United States Patent Application Publication US 2026/0265717 A1, published September 10, 2026 (application 19/163,801).

The application's sequence listing, which the Patent Office published only in electronic form, follows.

SEQUENCE LISTING (1384 sequences)

SEQ ID NO: 1 - protein, 612 aa, unidentified
  source 1..612: note = MG64-1 active effector
MSQITIQCRLVAKEPIRHTLWQLMADLNTPFINELLQKVAQHPDFEKWKQRGRLKVKVIEQLGNELKKDPRFLGQPARFYTSGINLVKYIFKSWLKLQQRLQQKLDRKRRWLEVLKSDDQLIKDGQTDLETIRQKATEILQSYEGTEQLFNTLFQAYNSEEDILTRTALNYLLKNRCKLPQKPEDAKKFAKRRRQVEIAIKRLQEQIKARLPQGRDVTNENWLETLNLACYTDPENIEEARSWQDKLLTKSSSIPFPINYETNEDLIWSKNEKGHLCVQFNGISDLKFKIYCDKRQLKWFQRFYEDQQIKKSNNNQHSSALFTLRSGRILWQEDKGKGQLWDIHRLTLQCTLDTRTWTQEGTEQVKEEKADEIAGILTRMNEKGDLTKNQQAFIQRKQSTLDKLENPFPRPSRPVYRGQSNILLGVSMELKKPATIAVIDGMTRKVLTYRNIKQLLGKNYPLLNRQRRQKQLQSHQRNVAQRKEAFNQFGDSELGEYIDRLLAKAIIAIAKQYQARSIVVPHLKDIREAIQSEIQALAEAKIPNCIEAQAEYAKKYRIQVHQWSYGRLIDNIQAQASKLGIVIEESQQPLQGTPLQKAAELAFKAYQSRLSA

SEQ ID NO: 2 - protein, 563 aa, unidentified
  source 1..563: note = MG64-1-B active transposition protein
MKNANSPPSSSVDDHQKEQHLVIPSELSDEAQLKLEVIQTLLEPCDRRTYGQRLREAAEKLGKSKRTVQRLVKKWEEEGLEAIAPTNRSDKGDFRIEEQLQEFIIKTYQNGNKGSLRVTRKQVYLKTKAKAEELSINPPSHMTVYRILQPLIEKQEKKKSIRSPGWRGSQLSVKTRAGQDLSVEYSNHVWQCDHTRADLLLVDQYGELLGRPWLTTVIDTYSRCIIGINLGFDAPSSQVVALALRHAILPKYYTPDYLLGEEWGTYGKPEHFYTDGGKDFRSNHLQQISVQLGFVCHLRDRPSEGGIVERPFKTLNLEFFSTLPGYTGSNVQERPEDAEKEACLTLRQLEQKLVRYIVDNYNQRMDARMGDQTRFQRWESGLIATPDVISERELDICLMKQTRRKVQRGGYLQFENLMYRGENLAGYAGESVILRFDPRDITTVLVYQKESNHEVFLTRAYAMDLETEQMSLDEAKASSKRVRDAGKTVGNRSILSEVRDRQIFPKAKKSKKERYQEEQKAITSKPLEITEWESEETDFSPPSSETPQVEVFDYETLQEDYGF

SEQ ID NO: 3 - protein, 278 aa, unidentified
  source 1..278: note = MG64-1-C active transposition protein
MTIQEAQAVAKQLGDIQLTSEKLQAEIQRLNRKTVVTLSHVEALHNWLEGKRQAKQSCRVVGESRTGKTIACNAYRLRHKPIQTPGKPPIVPVVYIQVTQECGAKDLFGAIIEHLKYQMTKGTVAEIRQRTFKVLQRCGVEMLIIDEADRLKPKTFAEVRDIFDKLNIAVVLVGTDRLDAVIKRDEQVYNRFRACHRFGKLAGDEFSQTVNIWERQVLKLPVASNLSSKRMLKILGQATGGYLGLLDMILRESAIRALKKGLQKIDLDTLKEVTEEYR

SEQ ID NO: 4 - protein, 171 aa, unidentified
  source 1..171: note = MG64-1-Q active transposition protein
MESREIQPWWFLVEPLAGESISHFLGRFRRENELTVTMMGKITGLGGTITRWEKFRFIPIPTEEELTALSEVVQVEVERLWQMFPPKGVGMKHQPIRLCGACYEEERCHKIEWQLKTTQFCSQHGLTLLSECPNCGARFQFPALWVNGWCHRCFLTFGEMVEGQSNKKKYL

SEQ ID NO: 5 - RNA, 319 nt, synthetic construct
  source 1..319: mol_type = other RNA; note = MG64-1 active effector tested sgRNA sequence
aaaataatcgcgccgtagatcatgttcttgattgaacctctgaactacgaaaaatgagggttagtttgactctcggcagatagtcttgctttctgaccctagtggctgtccaccctgatgctgatttctacaatttaggttgtagagatgattaacctgtaacttgaggttagctaataatttcattttatagggtaggtgcgctcccagcaataagtggcgtgggtttaccacagtgacggctactgaatcacctccgaccaaggaggaatccactgaaaagatggattgaaagnnnnnnnnnnnnnnnnnnnnnnnn

SEQ ID NO: 6 - RNA, 277 nt, synthetic construct
  source 1..277: mol_type = other RNA; note = MG64-1 active effector tracrRNA sequence
aaaataatcgcgccgtagatcatgttcttgattgaacctctgaactacgaaaaatgagggttagtttgactctcggcagatagtcttgctttctgaccctagtggctgtccaccctgatgctgatttctacaatttaggttgtagagatgattaacctgtaacttgaggttagctaataatttcattttatagggtaggtgcgctcccagcaataagtggcgtgggtttaccacagtgacggctactgaatcacctccgaccaaggaggaatccact

SEQ ID NO: 7 - DNA, 38 bp, synthetic construct
  source 1..38: mol_type = other DNA; note = MG64-1 active effector's target CRISPR repeat
cgtcacaatctattttggttaatgagatggattgaaag

SEQ ID NO: 8 - DNA, 449 bp, synthetic construct
  source 1..449: mol_type = other DNA; note = MG64-1 active transposon end RE
aatgaacaaaaatgtctgattattacataattgtttatttaatataattgtatcgtaatacttgaagtttggagacaagtaatttgttaatactgctccagtccctaaaaaagtgccattcgggtaaatgacacttaatctgttaatttactggaaaatgacagttaatttgttaatatagtaagcaataacttttgtcaaagattaatgctataattcagctaaagcagtgattatataaagctttcactctcaaatagttcggcgacacgattttgttaagacgacaaataattagttactgtacatttacccataactttgccgttttggtaaggttatcgttcaaaacacaagtggcaagattatggttcaaaacctaagtcccgtttagtttgcttgaacacttcacgaacttgagggtaacgaagaaagctagggtgagtcaa

SEQ ID NO: 9 - DNA, 319 bp, synthetic construct
  source 1..319: mol_type = other DNA; note = MG64-1 active transposon end LE
ctcttaaggaaatctatgtaagtttgttgggttagttgcgttttcagtaaatactgtgttatagtaagaacttgtgcggacgtatagctcagttggttagagtacatcgttgacatcgatggggtcactggttcgagtccagttacgtccatatttttttgaagtgtgtataatattaactatgtgactttatgtacattaacagattatttgtcatcggtaacaaattgttgtcatcttaacaaaatatttgtcatcaataacatattatgtgtcgtgtgcttattactgaaactaatcctagacgatggtaaaaaat

SEQ ID NO: 10 - DNA, 308 bp, synthetic construct
  source 1..308: mol_type = other DNA; note = MG64-1 active transposon outer bounds of RE
tgtacagtaactaattatttgtcgtcttaacaaaatcgtgtcgccgaactatttgagagtgaaagctttatataatcactgctttagctgaattatagcattaatctttgacaaaagttattgcttactatattaacaaattaactgtcattttccagtaaattaacagattaagtgtcatttacccgaatggcacttttttagggactggagcagtattaacaaattacttgtctccaaacttcaagtattacgatacaattatattaaataaacaattatgtaataatcagacatttttgttcatt

SEQ ID NO: 11 - DNA, 127 bp, synthetic construct
  source 1..127: mol_type = other DNA; note = MG64-1 active transposon minimal LE
tgtacattaacagattatttgtcatcggtaacaaattgttgtcatcttaacaaaatatttgtcatcaataacatattatgtgtcgtgtgcttattactgaaactaatcctagacgatggtaaaaaat

SEQ ID NO: 12 - protein, 643 aa, unidentified
  source 1..643: note = MG64-3 effector
MSKITIQCRLVASEATRQYLWHLMADIYTPFVNEMLRQIREDDNFEQWRQAGKIPAGVFEDYRKALKTESRFQGMPGRWYYAGREEVKRIYKSWLALRRRLRNQLSGQNRWLEVLQSDETLMAVSGLDLPALRAASTKLLDLLSSQIAKPAKGSKKTNRGKGKKQAKQTQGKSLYQSLWDLYKETEDILQKCAIAYLLKNKSQVPDKPEDPEKFRHRRRKAEIRTERLNEQLTKTRLPKGRDLTNEQWLEALAIATEQIPKDETEAAIWQSRLLTDAASLPFPVAYETNEDLKWFLNGKGRLCVSFNGLSEHTFEIYCDKRQLHWFKRFLEDQQIKKEHQGKRSSGLFTLRSGRISWTSPSDIDKSPCWTANRLTLHCSVDTRLWTQEGTEEVRQEKATNIAKIIAGTKAKGNLNQKQQDFITKRETTLKLLHNPFPRPSKPLYQGNPSIIAAVSFGLEKPATLAIVDITTGKAITYRSIRQLLDQNYKLFTKHRLQQQQRAHQRHQNQKESAENRISEGGLGEHVDSLIAKAILETAAEYGASSIVLPELGNIREIIQAEVIAKAERKIPGLKEKQDEYAAKFRASVHRWSYGRLAQKITTKAALQGLETESTRQPLQGSPQEKARNLAIAAYESRKVDQRA

SEQ ID NO: 13 - protein, 542 aa, unidentified
  source 1..542: note = MG64-3-B transposition protein
MELVNPDDLNSVEARLKLEIVEKLSEPCDRRTYGERLRSAAQKLECSVRTVQRLMKKWEQEGIHALIDSGRKDKGNPRISEDWQSFIKDAYDNGKCTPAQVFTKVRQRARQEGLDSHPSHMTVYRILNPLIEAKEQKNNIRNVGWKGARLALKTRDGEVLEIDYSNQVWQCDHTRADILLVDKYGYQMGRPWLTTVVDTYSRAIVGINLGYDAPSSRVVALALRHAILPKQYGAEYKLYAEWPTCGVPDHMFTDGGKDFRSNHLQQIGVQLGFICHLRDRPSEGGIVERPFGTINTQFFSTLPGYTGSNVQDRPPEAEAEACLTLHELEKLLVAYIVNTYNQRLDARMGDQTRIQRWEAGLLKQPPTISERELDICLMKQTRRTIYRGGYLQFENLTYWGETLAEQAGENIVLRYDPRDITRLLVYRYESDREVYLGVAQAQDLEGEVLALDDAKAHSRRIREDGKAVSNDAMLDEMRDREAFVDEKKKSRKERQKEEQEDLRQTPLPVIEADSFDEDESGEPQDNLEIPEFEIWEFDNNDI

SEQ ID NO: 14 - protein, 272 aa, unidentified
  source 1..272: note = MG64-3-C transposition protein
MVTTTLSEQEIQAHIERLRKDKTVALESVQQAHTWLDRKRNARQCGRIIGESRTGKTKACESYLKKNGLPDLSGKIPNIPISYFVPKQDCTSRELFRAILEHYGDELPRGTVGDARSKTFKVLRECQTEMLIIDEADRLKPKTFADVRDIFDNLEISVVLVGTKKRLDKVVKADEQVFNRFRSSYKIGTIPSSQLATIVGVWERDILKLPLPSNLTSESMLKEIRRATGKSRKGYYIGLIDMVLRAAAVMALEKGQMKVDKATLKVAVEDYL

SEQ ID NO: 15 - protein, 165 aa, unidentified
  source 1..165: note = MG64-3-Q transposition protein
MTMPIVPTWVFPVDPYSGESLSHFLGRFCRENHATLNQLGEKTGLGAVLGRWEKFRFIPPPNDAQLAALAKLVRLEVDQIKQMLPQEAMQNRVIRLCAACYAEEPYHRIEWQYKLANRCDRHHLLLLLECPNCKAKLPMPSKWANGTCKRCLTPFDQMVALQKGV

SEQ ID NO: 16 - protein, 692 aa, unidentified
  source 1..692: note = MG64-5 effector
MKTIRCCLCANPETRRYFWKIMVTYTLLVNELLAAMPQRPEFAQWKQRGTIAREAVRIVLTPLKTDPTYADLPKRFFSSAELLVCYVYKSWLALQKRRYWKLVGKQRWLQVIEDDLQSLLTDNFSLESVQSKAHQILEQAHKELEKQPQRFKKKGKKSRPLFGYLLDLYGTTADKLERRAIGHLLHHDLKVSDTEDFPETIQFSIDQQQVEIARLKEQLQSRLPDGRDPTQARFLEKLRIATALPELELEGFDEEHFSEWRTQKQIPLLNPLPYPVLFGSSSDLHWKLEPQKATTEANISPEVPTARSERVKERIQVRFKGDELQDSWFKLQCDRRQLPIFRQFVTDYLCQKQAPDHEKFGEGLFTLRSACLVWKEDPQGARKRKKRRKQGACQDEPWETHRLYLHCTIDTRFLTQEGTEQVRATKLDLAQKALEGIENKTALETVTQEPSAEQQKHLKRKQTTVHRLETQKPPVRPTIQPYEGKSNIVVGVSLSRHEPVTLIVFDTAQNKVLECMGTQALLKIHGIQSPRKNRSIGKLQQEQSQLLRRWRRKRKQNPHRRADGQRQDNYRSGNSESKLGDYLDRLIAARLVALATKRQASVIVLPELGDIRESVECSLQAKAQRKYPQHKKLQAKYAKHFRHEFHRWSYGRLQQYIAERATQQNLALLKGRQPKQGTEQEKVLEIISSACL

SEQ ID NO: 17 - protein, 636 aa, unidentified
  source 1..636: note = MG64-5-B transposition protein
MTNSRLGGTMKNLSDHPDSEKLTYEQEHCLVDELSPELQRKVELIQAIVDAPDRKTERQRIAIAAQELGRCTKTIRSYRDALREDGIVALTRTERSDKGQRRNISQPWIDLVLALYKRGQRSFCRSRNQVWLLIQGMTSKLLSDDWKTPEKRAELMEWYAQKLGAAAENAKSKLNKILGSIRKELEVGICMPPRSHMSVYGIIDDYLEQQHRKARHPGQGPEQVIQTTGELLVIEVTNGIFQADHSGIDILLKDKDGNEIGYPFLTVIIECASGCVTGFYLGFRQPGSHEVALALRHAILPKQYGPEYKLEKQWQCVGIPRYLVTDRAKEFKSKHLQQIAAELGFELRYRAYPSQGGLVESVFDKINKEVLSNLPGYKGSNVQKRPKNAEKYACLTIEDLEQELVRYFCDHYNQHFYPRMKDRTRAMQWEERLVEPPVIPDERELDLCLLKRKQTAKVQKYGTIQFQNEIYQGNCLLGRETEKISFRYNPSNIIHVLAYTVEETDKPSKFLGVLKARDRKEEKLSLHSLKLEQKLIRARGKKLDQSSIYNDALKRNERAERELHGLRKQQRRKEHERTGRSEGLGNVIDFKRQENEAIGTKNSQIGPIQKLVKRLKPKRKAKVAAKNWQQKLSENW

SEQ ID NO: 18 - protein, 291 aa, unidentified
  source 1..291: note = MG64-5-C transposition protein
MAQPQLISQQLQTQPSPFPLPDKEAEIDRLRAGAPFLTTDRDTALEQWLDTQRKSGNPGFICSAKGSGLSDSCQDYRMNRVRSKGMIQQLPVPVVYVRVPPICSVSHFHTTLLTALNHPITTGRLKDKRPRVRGRLKSIQTRQLIIDDADFLSFEALSEIAQIYDDLKIPSILCGTYYLEKRLQQRYWDRIGNSFLDFYEYPPMSQDEVVEVIDTWETEFLQWPEESDLLIEDVLKAVYVKTGGLRDALNEVLRKVAIQALKQDSYKITTEIIVSVLNGRVQPRIKPAQEE

SEQ ID NO: 19 - protein, 169 aa, unidentified
  source 1..169: note = MG64-5-Q transposition protein
MTDQQTVWMEHVEPYEGESISHYFGRFRRVEGNSFSAPTTLSAAVGIGPALSRWEKFRFNPFPSPQELEAMGKLIGLTVEQLRTMLPAKGERLVMRSTRLCGACYREAPYHRIHWQYESTEGCDKHRLRLISRCPVCDEKFALPVEWIEGACKQCGMKFTSMHKKQKPY

SEQ ID NO: 20 - protein, 640 aa, unidentified
  source 1..640: note = MG64-33 effector
MKESLYFVIRCLLSADAETRRTMWLLMQRYTLLVNKLLEVIPGSSEFPVWREQGYIPDNALAEFIDTIKPDLDYSGLPGRFYTSAKILVKNIYKSWFALQRKYSRKITGKIRWIKIINSEIDLIKNTEFELDQITNAANAALKLAKKKKEESEKSNSESSTSLLGILIEMQFKTKSPLKKRGINHLLLNNLNIEYKDFTLDSLEARVEVAFLEIEALEKRLRSRLPKGRDPDGYRYVLALSKAASLPEEALTPEKFDEIHADIPIYNELPYPLIYEGASNIVWTLIKPEGNRSNFGRLQIHFNGISELKFLIQCGRRQLPVFKGFYHDAIENKGRISRGEIPYNEGLNRFRSAQILWKPDPSLDFRKKKKNIPSTPWEVNRLYLHCSVDKATLSAEGTECLRQMKIKKIEEKKEKPLSPRKQTELERLQSAAPPPRPSIQPYVGDPDMVVCICFSPDEPVIVVPVDLAKEAALYALNTKALLNRATKAIWRMGKLETLSDNGKALCHDNGGKLNIRNPRTYSVQKPYGLVTRLNTLSEQQVKRRTREQSKGKYRGSQSLSNLSLSVCRLIAARLVDLSLQLNAGRVIIPDFEGIRDWVQAFIAAKAVKAFPDSKQQQKKFRQEFRAKYHRWSYRKLAQEI

SEQ ID NO: 21 - protein, 612 aa, unidentified; identical to SEQ ID NO: 1
  source 1..612: note = MG64-34 effector

SEQ ID NO: 22 - protein, 525 aa, unidentified
  source 1..525: note = MG64-35 effector
REVLSQLSTQSTIEGPPDTQTKRPKAKSRKSKKKQSTAQNKDLIGKLYKAYEATNDLTQRCILAYLIKDAGTISEEEETPEAFTHRIHRKQKDIARLEDRLQARLPKGRDLTGDIFTDTLFIAQHQEPEDVNQMRDWQAKLLMRPADLPDPIRYDSSTDMMWKPDDQGRITVNFNGLEKFLKNSDLEVKSWLKEHQAYPFRIQCDQRQLPYFQRFLADWQAYTADAENYPAGLLTLSSAMLAWRKGKKNRKGEPWNIHQLVLYCSFDTRLLTAEGTAAVQQQKIEKAQKQAESAQNKKLNDNQRQARNRSATTLRKLDNLPTRPSQKAYQAKPELLLGLSIGLSEPITVAVVDASTQQVLTYRTSHTLLGEQHRLLRRQRQKQQQNRLKRQQNQKKGIRHQPSESELGQYVDRLLAKAITQLAQSHQVSSIVLPNLLNRRDLLDSEIQARAEQQCPGSISAQEKYAKAFRQSLHSWDYRRLIEAIRGSAGKHDIPLEEAFLTASSDPKEQAKEIAIAAYQARTED

SEQ ID NO: 23 - protein, 724 aa, unidentified
  source 1..724: note = MG64-36 effector
METREMSQPNLPACMKTIMCCLCASPETRRYFWETMVSYTLLVNELLEAVPNRPEFPQWQRRGTIDREAVRIVLKPLKAKPNYAQLPKRFFTSAELIVCYVYKSWLALQKRRQWQLEGKHRWLAAIASDLKSILSSDLSFETVQAKARQILEQAEQDLEPPPPEVTKKGKKSKRRKKSKSLLKYLLDRHDETTQELERRAICHLLRHDLKVIEEEDTPETIQHVIDRKRIEIERLTEQLQSRLPKGRDPNHERFMERLEMAIALPDGSPKHWDPEEFDEWRIQKQIPELNTLPYPILFGSASDLYWDILNDTTSAATVSAKKKSRKSKRPNERLQVRFKGLDEHKCKIQCDRRQLKTFRQFATDYISNQQLPKDEKFGEGLFALRSACLIWKVDPDASASRRNRQKAVLRKDSHLKASLEKGEVCLIDYPWETHRLYLHCTFDIRLLTQQGTEQVRLKKLDAAQKSVEKTQERQAADPSITMTANQASRFKAKQTSISRLEKNRPAERPECQIYQPNPNIVVGISLSRHEPVTVVVFNKEKNQASEYWSTESLLKMRGITSPRNNQSIVQLQHEQQQLLRRWRRQRHYNIYQRPEGQKQGDYHQHDAESRLGDYLDRLIAARVTELAVRRQAAAIALPELQNIRESVESDIQARAEKKHPHHANLQAQYAKQYRREFHRWSFGRFEQYITEAAKQRGIAVYKGRQPKHGNEQEKALAVVTNVIA

SEQ ID NO: 24 - protein, 618 aa, unidentified
  source 1..618: note = MG64-37 effector
MSQKTVRARLIVPEETRKAFWELTAGDNTPLVNEALRLLPTHSDFSKWRQKGNLPDKIAEDLVKTLKEDLRFVGQPFWSYISAHKQVTYTFRSWLALQHRKQWKLAGKRLWLEILQPDEILAESVGYTPDALIKAAKKNLADIEAQDNPFDALFSAYRKTKSLKRKSAIAYLLKRSAKLLPEEEDIAKLAQRYRKTEIFIQRLEAQLKASLPKGRDMSGDRQLEALQQIIQAPPMDDVSYNAWKNALTTEPAAFPFPISIETAAWLIWSQDDKGRLLLQLSGWGQHTFKVYFDKAHQHWFWRFLQDQETNQNGGDQHSAALFTLRAAKIMWFPSKKHKDAPEPWHRYHLNLLCTIDTRAWTQEGTEIIAQEKAVKTAKQLASMRKKESLTQNQQGYIRRLESTLNRLQVPYPRPSRPIYQGKPEILVGVSMGLEKVATVAVVNALTGRVLTYRSEKQLLGENYPLLRQARAEIAKKSHQGHRQRLRGVKSISKESDKGKQVDRLFAKAIVELVVEHQAGSIVLPDLAYKREIIEAEFQQRAIEKVPDFVDGQKEYAKAYLSQVHRWPYARLQGCTTSKAEQSGISCEITKQQYSGTPQDKAKGLGFLAYSQRSTALAE

SEQ ID NO: 25 - protein, 661 aa, unidentified
  source 1..661: note = MG64-38 effector
MSIITIHCHLHTTEAIRRLLWQVMAASNTPLISTLLRHVAEHPDFDTWQTNGSVPVKTVRNIAEPLKAHYPSQPGRFYASAYQMVSYTYESWLATQKMIKLRLDGTRRWLSIFKSDAELLELTGLSLESLRQSAREVLSQLSTQSTAGRPSDTQTKPPKAKSRKSKKKQATAQDKDLIGKLFKAYEATDDLTQRCILAYLIKNGGTITDEAETPEAFAHRLHRKQKDIAQLENRLQARLPKGRDLTGDTFIDTLLIAQQQEPEDVAQMRDWQAKLLMRPADLPYPIRYDSSTDMMWKPDDQERITVNFNGLEKFLKNSDPAVKAWLKEHKEYPFRIQCDQRQLPYFQRFLTDWQAYTADKANYPAGLLTLSSAMLAWRKSKKKRKGEPWNTYQLALYCSFDTRLLTAEGTVEVQQEKLRKAQKQANSTKDKKLDENQLQAQTRSATSLRKLENLPARPSRKPYEGKSELLLGISIGFSEPVTVAIVDASTQQAITYRTSRTLLGDQHRLLRRQRQQKQQNRLKRQQNQKKGIRHQPSESELGQYVDRLLAKAIIQLAQTHQVSSIVLPNLTNDRDILNSEIQARAEQKCPGAIAAQAKYAKEVRISIHSWDYRRLSDAIRSSASKQGIPLEEAFLTVRTNPKEQARELAIAAYQARTENRN

SEQ ID NO: 26 - protein, 625 aa, unidentified
  source 1..625: note = MG64-39 effector
ASSTHKPMSQKTIRCRLVASEETRRAIWQLMAERNTPLVNEVLRQLPEHPDFPKWQQRGKLPDLPVKRLIDSLKPDPRFCDQPVWYYISAQKQVAYTFRSWLSLQKRKQWRLEGKRRWLDILQPDAELAEQAKCSVEALRLAASNMLKKVDDPDPFKLLFKEYGTSKSTKRQCALAYLLKRDAKLEPEAEDLEKLDQRRSKAEIQIKQLETQLKASLPKGRDLTGQIQAQALTQSVQSPPLDDEAYSTWHASLAREPAIFPFPIIYETIESLVWSKNSKGRYSVCFQGQGTGIHTFKIYCDKPHQHWFERFWIDQETKRSGNDRHSAGLFTLRSARLSWIPSKKHQDEPEPWNRYYLSLSCTVDTALWTQEGTQTVIQEKAVATASKLQSMQEKESLNKNQQGYVRRLESTLTRLQTPYPRPSRALYQGRSDILVGVSMGLDKPATVAVVNALTGEVLTYRSTKQLLGEQYPLLQRARSERAKVAHQGHRQRRKGGKRVNQESNLGKHVDRLLAKAIVEVAQQYQAGSIVLPDLAHIREIVESEVKQKAAKKVPDFLDGQKQYAKAYRTQVHQWSYHRLQDAITSKAGQSSIATEVAKQDYSGSPQEKAKSLCLAGYEQRLALSS

SEQ ID NO: 27 - protein, 595 aa, unidentified
  source 1..595: note = MG64-40 effector
MAERNTPLVNEVLRQLPEHPDFAKWQQKGNLPDVAVKRIIDALKSDPHFSDQPFWYYTSAQKQVTYTFKSWLSIQRRKQWRLQGKRFWLEILLPDAKLAELAECSVEKLRTEAAKILTKVGDVDPFKHLLEQYRHEKKLLRKYAIAFLLKRNTGIDREEDLEQLKQRSRRVELQIRRLEIQLQASLPKGRDLTGERQAAALAQSVLASPDDDESYELWRNTVTREPAQFPFPVICETSEWLKWQRDQNGRISVGFSALSEHVFKIYCDKPHQHWFNRFFEDQETKRSGGKQHSAGLFTLRSAKLTWVPSNKHANASEPWNCYYLNLSCTVDTRLWTQEGTQIVIQEKAAEKAGKLESMRRKENLSKTQQGYIKRLEATLDKLQTPYPRPSRQLYSGKANILAGVSMGLDKPATVAVVDALTGEVLTYRSVKQLLGENHQLLRRAQIEKTKIAHRGHKNRRQGGRKVSEESNVAQQVDRLLAKSIVEIARKYQASSIVVPDLADIREIVETEVKARAQDKVPDFVEGQQQYAKAYRTQVHQWSYRRLQEAVRTKAEQSGITIEVVRQGLSGTQHEKAKALALQGYEKRIREHVEMA

SEQ ID NO: 28 - protein, 537 aa, unidentified
  source 1..537: note = MG64-41 effector
QLAGQNRWLEVLQNDETLMAVSGLEIQALRAESTKLLDLLSSQITKPAKGSKKTNRGKGKKQAKQTQGKTLYQSLWDLYRETEDILQKCAIAYLLKNKCQVPGKPEDPEKFQHRRRKAEIRAERLNEQLIETRLPKGRDLTNEQWLEALKIATEQVPKDEEEAAIWQSRLLTNAAKFPFPVAYETNEDLKWFLNGKGRLCVRFNGLSEHTFKIYCDQRQLHWFKRFLENKQNKKDNKGKHTSGLFTLRSGRILWKPHSGVVKNAPWTVNHLTLQCSVDTRLWTAEGTEQVRQEKATSIAKVIAGTKAKGNLNRNQLDSISNREKTLELMHNPFPRPSQPIYQGNPSIIAAVSFGLEKPATLAIVDVITGKAITYRSIRQLLGNSYKLFNKQRLKQKQRDYWRHKNQQKSADNRISEGGLGDYVDSLIAKSIVDTAARYEAVSIVLPDQSNIREIIHAEIQAKAERKIPGLKEKQDKYAAQYRRSVHRWSYGRLSQKITTKAAIHGVAIEITRQPLQGTPQEKAVGLAVSAYQSRQVG

SEQ ID NO: 29 - protein, 643 aa, unidentified
  source 1..643: note = MG64-42 effector
MSQITVQCRLVASEETRQYLWYLMADIYTPFVNEMLRQIREDDNFEQWRQAGKIPAGVFEDYRKALKTESRFQGMPGRWYYAGREEVKRIYKSWLALRRRLRNQLSGQNRWLEVLQSDETLMAVSGLDLPALRAASTKLLDLLSSQIAKPAKGSKKTNRGKGKKQAKQTQGKSLYQSLWDLYKETEDILQKCAIAYLLKNKSQVPDKPEDPEKFRHRRRKAEIRTERLNEQLTKTRLPKGRDLTNEQWLEALAIATEQIPKDETEAAIWQSRLLTDAASLPFPVAYETNEDLKWFLNGKGRLCVSFNGLSEHTFEIYCDKRQLHWFKRFLEDQQIKKEHQGKRSSGLFTLRSGRISWTSPSDIDKSPCWTANRLTLHCSVDTRLWTQEGTEEVRQEKATNIAKIIAGTKAKGNLNQKQQDFITKRETTLKLLHNPFPRPSKPLYQGNPSIIAAVSFGLEKPATLAIVDITTGKAITYRSIRQLLDQNYKLFTKHRLQQQQRAHQRHQNQKESAENRISEGGLGEHVDSLIAKAILETAAEYGASSIVLPELGNIREIIQAEVIAKAERKIPGLKEKQDEYAAKFRASVHRWSYGRLAQKITTKAALQGLETESTRQPLQGSPQEKARNLAIAAYESRKVDQRA

SEQ ID NO: 30 - protein, 526 aa, unidentified
  source 1..526: note = MG64-43 effector
MPTTLAPKRPLSKSSDYMKTIRCCLCANPETRRYFWKIMVTYTLLVNELLAAMPQRPEFAQWKQRGTIAREAVRIVLTPLKSDPTYADLPKRFFSSAELLVCYVYKSWLALQKRRYWKLVGKQRWLQVIEDDLQSLLTDNFSLESVQSKAHQILEQAHKELEKQPQRFKKKGKKSRPLFGYLLDLYGTTADKLERRAIGHLLHHDLKVSDTEDFPETIQFSIDQQQVEIARLKEQLQSRLPDGRDPTQARFLEKLRIATALPELELEGFDEEHFSEWRTQKQIPLLNPLPYPVLFGSSSDLHWKLEPQKATTEANISPEVPTARSERVKERIQVRFKGDELQDSWFKLQCDRRQLPIFRQFVTDYLCQKQAPDHEKFGEGLFTLRSACLVWKEDPQGARKRKKRRKQGACQDEPWETHRLYLHCTIDTRFLTQEGTEQVRATKLDLAQKALEGIENKTALETVTQEPSAEQQKHLKRKQTTVHRLETQKPPVRPTIQPYEGKSNIVVGVSLSRHEPVTLIVFDTAQ

SEQ ID NO: 31 - skipped

SEQ ID NO: 32 - DNA, 417 bp, synthetic construct
  source 1..417: mol_type = other DNA; note = MG64-3 effector intergenic region encoding tracrRNA
aggttcgtatgtaccactaaaataaatgcagcgcctaagttcatgtcgtcagcggcctctgtgcttagaaaaagggctagtttgactgtctgaacgcagtcttgctttctgacctagataactgtccatccccaaagctgtgagcgcacgcagcaagagggcacgggttccggagtgatggttatcaaattcacctccgagcaaggaggaatccacccaaaacttaaatttggcaaacctaagcgaggtcaaaaaccctgggaggtttgccaaaagactgaagctcctggtctacaaaggtttgagtcatctagtttgtcccaatttctggtctgtcataagaatttagtagaactagattgggctttgccaaattcaactctgcaaagcttgcagggtatgcctttccgatggcaa

SEQ ID NO: 33 - DNA, 468 bp, synthetic construct
  source 1..468: mol_type = other DNA; note = MG64-5 effector intergenic region encoding tracrRNA
ctcagcacagatatctgaaccttgaaaaatgaatatctgatatttcttgtgcgcgccggttctttagggactgagcgataagttagggcgagtttaattgctttccagcccgtgtagttgtccgctctcttgtgcagcttgctgcatgctaggtgtcgggtcgcgccgacatccaagaggccatgtttctgtagttagaggctatctcttcaattatagggatacaggtgtacgtgtcgtggcagctaccaaacagccccgagcaagggggcccatccaaattttggcaaacctcagcgcagtcaatatgcccaggcggtttgccaatctctcaaatccttgtgcaataggtctttcatgcaatctcgtcattgagaagcttcctagaggcgttcggcatccccaaaataattgaggtttgccaaataccccctcgaaaagactgctgtataagcttttcaagctgcg

SEQ ID NO: 34 - DNA, 37 bp, synthetic construct
  source 1..37: mol_type = other DNA; note = MG64-3 effector target CRISPR repeat
gtcgcccaaggcatttcagggcagggcggattgaaag

SEQ ID NO: 35 - DNA, 37 bp, synthetic construct
  source 1..37: mol_type = other DNA; note = MG64-5 effector target CRISPR repeat
gtttcatccctgcatttcaatgcagatgggatgaaag

SEQ ID NO: 36 - DNA, 105 bp, synthetic construct
  source 1..105: mol_type = other DNA; note = MG64-1 LE 105bp
tgtacattaacagattatttgtcatcggtaacaaattgttgtcatcttaacaaaatatttgtcatcaataacatattatgtgtcgtgtgcttattactgaaacta

SEQ ID NO: 37 - DNA, 86 bp, synthetic construct
  source 1..86: mol_type = other DNA; note = MG64-1 LE 86bp
tgtacattaacagattatttgtcatcggtaacaaattgttgtcatcttaacaaaatatttgtcatcaataacatattatgtgtcgt

SEQ ID NO: 38 - DNA, 68 bp, synthetic construct
  source 1..68: mol_type = other DNA; note = MG64-1 LE 68bp
tgtacattaacagattatttgtcatcggtaacaaattgttgtcatcttaacaaaatatttgtcatcaa

SEQ ID NO: 39 - DNA, 242 bp, synthetic construct
  source 1..242: mol_type = other DNA; note = MG64-1 RE 242bp
tgtacagtaactaattatttgtcgtcttaacaaaatcgtgtcgccgaactatttgagagtgaaagctttatataatcactgctttagctgaattatagcattaatctttgacaaaagttattgcttactatattaacaaattaactgtcattttccagtaaattaacagattaagtgtcatttacccgaatggcacttttttagggactggagcagtattaacaaattacttgtctccaaac

SEQ ID NO: 40 - DNA, 196 bp, synthetic construct
  source 1..196: mol_type = other DNA; note = MG64-1 RE 196bp
tgtacagtaactaattatttgtcgtcttaacaaaatcgtgtcgccgaactatttgagagtgaaagctttatataatcactgctttagctgaattatagcattaatctttgacaaaagttattgcttactatattaacaaattaactgtcattttccagtaaattaacagattaagtgtcatttacccgaatggcac

SEQ ID NO: 41 - DNA, 178 bp, synthetic construct
  source 1..178: mol_type = other DNA; note = MG64-1 RE 178bp
tgtacagtaactaattatttgtcgtcttaacaaaatcgtgtcgccgaactatttgagagtgaaagctttatataatcactgctttagctgaattatagcattaatctttgacaaaagttattgcttactatattaacaaattaactgtcattttccagtaaattaacagattaagtgt

SEQ ID NO: 42 - DNA, 260 bp, synthetic construct
  source 1..260: mol_type = other DNA; note = MG64-1 RE internal deletion 50
tgtacagtaactaattatttgtcgtcttaacaaaatcgtgtcgccgaactatttgagagtgaaagaaagttattgcttactatattaacaaattaactgtcattttccagtaaattaacagattaagtgtcatttacccgaatggcacttttttagggactggagcagtattaacaaattacttgtctccaaacttcaagtattacgatacaattatattaaataaacaattatgtaataatcagacatttttgttcatt

SEQ ID NO: 43 - DNA, 231 bp, synthetic construct
  source 1..231: mol_type = other DNA; note = MG64-1 RE internal deletion 81
tgtacagtaactaattatttgtcgtcttaacaaaatcgtgtcgccgaactatttattaacaaattaactgtcattttccagtaaattaacagattaagtgtcatttacccgaatggcacttttttagggactggagcagtattaacaaattacttgtctccaaacttcaagtattacgatacaattatattaaataaacaattatgtaataatcagacatttttgttcatt

SEQ ID NO: 44 - DNA, 96 bp, synthetic construct
  source 1..96: mol_type = other DNA; note = MG64-1 RE internal deletion 81 & 178bp
tgtacagtaactaattatttgtcgtcttaacaaaatcgtgtcgccgaactattaacaaattaactgtcattttccagtaaattaacagattaagtg

SEQ ID NO: 45 - RNA, 237 nt, synthetic construct
  source 1..237: mol_type = other RNA; note = MG64-1 engineered single guide 1
aaaataatcgcgccgtagatcatgttcttgattgaacctctgaactacgaaaaatgagggttagtttgactctcggcagatagtcttgctttctgaccctagtggctgtccaccctgatgctgatttctacatagggtaggtgcgctcccagcaataagtggcgtgggtttaccacagtgacggctactgaatcacctccgaccaaggaggaatccactgaaaagatggattgaaag

SEQ ID NO: 46 - RNA, 214 nt, synthetic construct
  source 1..214: mol_type = other RNA; note = MG64-1 engineered single guide 2
aaaataatcgcgccgtagatcatgttcttgattgaacctctgaactacgaaaaatgagggttagtttgactctcggcagatagtcttgctttctgaccctagtggctgtccaccctgatgctggaaacagcaataagtggcgtgggtttaccacagtgacggctactgaatcacctccgaccaaggaggaatccactaaaagatggattgaaag

SEQ ID NO: 47 - RNA, 170 nt, synthetic construct
  source 1..170: mol_type = other RNA; note = MG64-1 engineered single guide 3
aaaataatcgcgccgtagatcatgttcttgattgaacctctgaactacgaaaaatgagggttagtttgactctcggcagatagtcttgctttctgaccctagtggctgtgaaaacggctactgaatcacctccgaccaaggaggaatccactgaaaagatggattgaaag

SEQ ID NO: 48 - RNA, 276 nt, synthetic construct
  source 1..276: mol_type = other RNA; note = MG64-1 engineered single guide 4
aaaataatcgcgccgtagatcatgttcttgattgaacctctgaactacgaaaaatgagggttagtttgactctcggcagatagtcttgctttctgaccctagtggctgtccaccctgatgctgatttctacaatttaggttgtagagatgattaacctgtaacttgaggttagctaataatttcattttatagggtaggtgcgctcccagcaataagtggcgtgggtttaccacagtgacggctactgaatcacctccgaccaaggaggatgaaag

SEQ ID NO: 49 - RNA, 281 nt, synthetic construct
  source 1..281: mol_type = other RNA; note = MG64-1 engineered single guide 5
aaaataatcgcgccgtagatcatgttcttgattgaacctctgaactacgaaaaatgagggttagtttgactctcggcagatagtcttgctttctgaccctagtggctgtccaccctgatgctgatttctacaatttaggttgtagagatgattaacctgtaacttgaggttagctaataatttcattttatagggtaggtgcgctcccagcaataagtggcgtgggtttaccacagtgacggctactgaatcacgaatccactgaaaagatggattgaaag

SEQ ID NO: 50 - RNA, 284 nt, synthetic construct
  source 1..284: mol_type = other RNA; note = MG64-1 engineered single guide 6
gccgtagatcatgttcttgattgaacctctgaactacgaaaaatgagggttagtttgactctcggcagatagtcttgctttctgaccctagtggctgtccaccctgatgctgatttctacaatttaggttgtagagatgattaacctgtaacttgaggttagctaataatttcattttatagggtaggtgcgctcccagcaataagtggcgtgggtttaccacagtgacggctactgaatcacctccgaccaaggaggaatccactgaaaagatggattgaaag

SEQ ID NO: 51 - RNA, 283 nt, synthetic construct
  source 1..283: mol_type = other RNA; note = MG64-1 engineered single guide 7
aaaataatcgcgccgtagatcatgcctctgaactacgaaaaatgagggttagtttgactctcggcagatagtcttgctttctgaccctagtggctgtccaccctgatgctgatttctacaatttaggttgtagagatgattaacctgtaacttgaggttagctaataatttcattttatagggtaggtgcgctcccagcaataagtggcgtgggtttaccacagtgacggctactgaatcacctccgaccaaggaggaatccactgaaaagatggattgaaag

SEQ ID NO: 52 - RNA, 273 nt, synthetic construct
  source 1..273: mol_type = other RNA; note = MG64-1 engineered single guide 8
aaaataatcgcgccgtagataactacgaaaaatgagggttagtttgactctcggcagatagtcttgctttctgaccctagtggctgtccaccctgatgctgatttctacaatttaggttgtagagatgattaacctgtaacttgaggttagctaataatttcattttatagggtaggtgcgctcccagcaataagtggcgtgggtttaccacagtgacggctactgaatcacctccgaccaaggaggaatccactgaaaagatggattgaaag

SEQ ID NO: 53 - RNA, 263 nt, synthetic construct
  source 1..263: mol_type = other RNA; note = MG64-1 engineered single guide 9
aaaataatcgcgccgcgaaaaatgagggttagtttgactctcggcagatagtcttgctttctgaccctagtggctgtccaccctgatgctgatttctacaatttaggttgtagagatgattaacctgtaacttgaggttagctaataatttcattttatagggtaggtgcgctcccagcaataagtggcgtgggtttaccacagtgacggctactgaatcacctccgaccaaggaggaatccactgaaaagatggattgaaag

SEQ ID NO: 54 - RNA, 278 nt, synthetic construct
  source 1..278: mol_type = other RNA; note = MG64-1 engineered single guide 10
aaaataatcgcgccgtagatcatgttcttgattgaacctctgaactacgaaaaatgcggcagatagtcttgctttctgaccctagtggctgtccaccctgatgctgatttctacaatttaggttgtagagatgattaacctgtaacttgaggttagctaataatttcattttatagggtaggtgcgctcccagcaataagtggcgtgggtttaccacagtgacggctactgaatcacctccgaccaaggaggaatccactgaaaagatggattgaaag

SEQ ID NO: 55 - RNA, 215 nt, synthetic construct
  source 1..215: mol_type = other RNA; note = MG64-1 engineered single guide 11
aaaataatcgcgccgtagatcatgttcttgattgaacctctgaactacgaaaaatgagggttagtttgactctcgcctagtggctgtccaccctgatgctgatttctacatagggtaggtgcgctcccagcaataagtggcgtgggtttaccacagtgacggctactgaatcacctccgaccaaggaggaatccactgaaaagatggattgaaag

SEQ ID NO: 56 - RNA, 221 nt, synthetic construct
  source 1..221: mol_type = other RNA; note = MG64-1 engineered single guide 12
aaaataatcgcgccgtagatcatgttcttgattgaacctctgaactacgaaaaatgagggttagtttgactctcggcagatagtcttgctttctgaccctagtggctgtccaccctgatgctgatttctacatagggtaggtgcgctgtgggtttaccacagtgacggctactgaatcacctccgaccaaggaggaatccactgaaaagatggattgaaag

SEQ ID NO: 57 - RNA, 226 nt, synthetic construct
  source 1..226: mol_type = other RNA; note = MG64-1 engineered single guide 13
aaaataatcgcgccgtagatcatgttcttgattgaacctctgaactacgaaaaatgagggttagtttgactctcggcagatagtcttgctttctgaccctagtggctgtccaccctgatgctgatttctacatagggtaggtgcgctcccagcaataagtggcgcagtgacggctactgaatcacctccgaccaaggaggaatccactgaaaagatggattgaaag

SEQ ID NO: 58 - RNA, 224 nt, synthetic construct
  source 1..224: mol_type = other RNA; note = MG64-1 engineered single guide 14
aaaataatcgcgccgtagatcatgttcttgattgaacctctgaactacgaaaaatgagggttagtttgactctcggcagatagtcttgctttctgaccctagtggctgtccaccctgatgctgatttctacatagggtaggtgcgctcccagcaataagtggcagtgacggctactgaatcacctccgaccaaggaggaatccactgaaaagatggattgaaag

SEQ ID NO: 59 - RNA, 204 nt, synthetic construct
  source 1..204: mol_type = other RNA; note = MG64-1 engineered single guide 15
aaaataatcgcgccgtagatcatgttcttgattgaacctctgaactacgaaaaatgagggttagtttgactctcggcagatagtcttgctttctgaccctagtggctgtccaccctgatgctgatttctacatagggtaggtgcgctcccagcaataagtggcgtgggtttaccacagtgacggctactgaatcacgatgaaag

SEQ ID NO: 60 - RNA, 181 nt, synthetic construct
  source 1..181: mol_type = other RNA; note = MG64-1 engineered single guide 16
gccgtagatcatgcctctgaactacgaaaaatgagggttagtttgactctcggcagatagtcttgctttctgaccctagtggctgtccaccctgatgctgatttctacatagggtaggtgcgctcccagcaataagtggcgtgggtttaccacagtgacggctactgaatcacgatgaaag

SEQ ID NO: 61 - RNA, 262 nt, synthetic construct
  source 1..262: mol_type = other RNA; note = MG64-1 engineered single guide 17
aaaataatcgcgccgtagatcatgttcttgattgaacctctgaactacgaaaaatgagggttagtttgactctcggcagatagtcttgctttctgaccctagtggctgtccaccctgatgctgatttctacaatttaggttgtagagatgattaacctgtaacttgaggttagctaataatttcattttatagggtaggtgcgctcccagcaataagtggcgtgggtttaccacagtgacggctactgaatcacgatgaaag

SEQ ID NO: 62 - RNA, 272 nt, synthetic construct
  source 1..272: mol_type = other RNA; note = MG64-1 engineered single guide 18
gccgtagatcatgcctctgaactacgaaaaatgagggttagtttgactctcggcagatagtcttgctttctgaccctagtggctgtccaccctgatgctgatttctacaatttaggttgtagagatgattaacctgtaacttgaggttagctaataatttcattttatagggtaggtgcgctcccagcaataagtggcgtgggtttaccacagtgacggctactgaatcacctccgaccaaggaggaatccactgaaaagatggattgaaag

SEQ ID NO: 63 - RNA, 251 nt, synthetic construct
  source 1..251: mol_type = other RNA; note = MG64-1 engineered single guide 19
gccgtagatcatgttcttgattgaacctctgaactacgaaaaatgagggttagtttgactctcggcagatagtcttgctttctgaccctagtggctgtccaccctgatgctgatttctacaatttaggttgtagagatgattaacctgtaacttgaggttagctaataatttcattttatagggtaggtgcgctcccagcaataagtggcgtgggtttaccacagtgacggctactgaatcacgatgaaag

SEQ ID NO: 64 - protein, 122 aa, unidentified
  source 1..122: note = MG64-55 effector
MSQITVRARLIAPEETRRAYWDLMAASNTPLINEALRILPTLPDFPKWRQKGNLPDKAAENLIIKLKEDPRFVGQLFWSYISAHKQVTYTFRSWLALQHRKQWKLAGKRLWLEILQPDETLA

SEQ ID NO: 65 - protein, 134 aa, unidentified
  source 1..134: note = MG64-55-B transposition protein
SSSVSKGTMMAQWRNAYTSILKLIDRQSLKAKSVHLGHLHKGISRARSLREWEAAKKALKKQNKNLTSQNVSTYFEDEERTPQKSMRQRRKAAQKANKKPLPMIEDDLQEESNLEDEKNPLLDLEVTYDDDLFE

SEQ ID NO: 66 - protein, 272 aa, unidentified
  source 1..272: note = MG64-55-C transposition protein
MEKQVDQIASALGALPELSPEIHKELERLSKRPYILLPKVESCHIFLEECRLGRAHGRIVGDSGVGKTISAKAYSKRLAEASTEKNVIYTILNPNCTPKEFYEKILEALGFTYTKGSIKFLRNRACQVLSRRQISVLFIDEASFLKMDAIGELIYLEESEVVPSIFLIGTDRLDTLLSGNEQVARRYPRYQYGRLHDKELKDVVDLWEQKVLQLPVKSNLKYKAKLNVITKATSGCLGEIDQLLRRAARKALILGESKISLNILREVAGQFE

SEQ ID NO: 67 - protein, 169 aa, unidentified
  source 1..169: note = MG64-55-Q transposition protein
MNDAQAAQWHFKPEPFEGESFSHFLGRYCAVNCIAPNILAKHIEAGSVAIGRWRKLRYNPSPSERHLQRLADVTGVSQERLLAMLPQEPMQIGTIRLCAACYGEEPCHRIRWQYKSTQFCDRHQLTLLARCPCCKAPFPIPAEWDAGICLRCGKAFVELAEFQKSVLGQ

SEQ ID NO: 68 - RNA, 239 nt, synthetic construct
  source 1..239: mol_type = other RNA; note = MG64-1 active effector engineered sgRNA 11
gaaaataatcgcgccgtagatcatgttcttgattgaacctctgaactacgaaaaatgagggttagtttgactctcgcctagtggctgtccaccctgatgctgatttctacatagggtaggtgcgctcccagcaataagtggcgtgggtttaccacagtgacggctactgaatcacctccgaccaaggaggaatccactgaaaagatggattgaaagnnnnnnnnnnnnnnnnnnnnnnn

SEQ ID NO: 69 - RNA, 245 nt, synthetic construct
  source 1..245: mol_type = other RNA; note = MG64-1 active effector engineered sgRNA 12
gaaaataatcgcgccgtagatcatgttcttgattgaacctctgaactacgaaaaatgagggttagtttgactctcggcagatagtcttgctttctgaccctagtggctgtccaccctgatgctgatttctacatagggtaggtgcgctgtgggtttaccacagtgacggctactgaatcacctccgaccaaggaggaatccactgaaaagatggattgaaagnnnnnnnnnnnnnnnnnnnnnnn

SEQ ID NO: 70 - RNA, 250 nt, synthetic construct
  source 1..250: mol_type = other RNA; note = MG64-1 active effector engineered sgRNA 13
gaaaataatcgcgccgtagatcatgttcttgattgaacctctgaactacgaaaaatgagggttagtttgactctcggcagatagtcttgctttctgaccctagtggctgtccaccctgatgctgatttctacatagggtaggtgcgctcccagcaataagtggcgcagtgacggctactgaatcacctccgaccaaggaggaatccactgaaaagatggattgaaagnnnnnnnnnnnnnnnnnnnnnnn

SEQ ID NO: 71 - RNA, 248 nt, synthetic construct
  source 1..248: mol_type = other RNA; note = MG64-1 active effector engineered sgRNA 14
gaaaataatcgcgccgtagatcatgttcttgattgaacctctgaactacgaaaaatgagggttagtttgactctcggcagatagtcttgctttctgaccctagtggctgtccaccctgatgctgatttctacatagggtaggtgcgctcccagcaataagtggcagtgacggctactgaatcacctccgaccaaggaggaatccactgaaaagatggattgaaagnnnnnnnnnnnnnnnnnnnnnnn

SEQ ID NO: 72 - RNA, 263 nt, synthetic construct
  source 1..263: mol_type = other RNA; note = MG64-1 active effector engineered sgRNA v2-1
gaattaatagcgccgccgttcatgcttctaggagcctctgaaaggtgacaaatgcgggttagtttggctgttgtcagacagtcttgctttctgaccctggtagctgcccaccccgaagctgctgttccttgtgaacaggaattaggtgcgcccccagtaataagggtatgggtttaccacagtggtggctactgaatcacctccgagcaaggaggaacccactgaaaggtgggttgaaagnnnnnnnnnnnnnnnnnnnnnnn

SEQ ID NO: 73 - RNA, 262 nt, synthetic construct
  source 1..262: mol_type = other RNA; note = MG64-1 active effector engineered sgRNA 20
gccgtagatcatgcctctgaactacgaaaaatgagggttagtttgactctcggcagatagtcttgctttctgaccctagtggctgtccaccctgatgctgatttctacaatttaggttgtagagatgattaacctgtaacttgaggttagctaataatttcattttatagggtaggtgcgctcccagcaataagtggcgtgggtttaccacagtgacggctactgaatcacgatgaaagnnnnnnnnnnnnnnnnnnnnnnn

SEQ ID NO: 74 - RNA, 241 nt, synthetic construct
  source 1..241: mol_type = other RNA; note = MG64-3 effector sgRNA
gaaataaatgcagcgcctaagttcatgtcgtcagcggcctctgtgcttagaaaaagggctagtttgactgtctgaacgcagtcttgctttctgacctagataactgtccatccccaaagctgtgagcgcacgcagcaagagggcacgggttccggagtgatggttatcaaattcacctccgagcaaggaggaatccacccgaaagggcggattgaaagnnnnnnnnnnnnnnnnnnnnnnn

SEQ ID NO: 75 - RNA, 264 nt, synthetic construct
  source 1..264: mol_type = other RNA; note = MG64-5 effector sgRNA
gcgcgccggttctttagggactgagcgataagttagggcgagtttaattgctttccagcccgtgtagttgtccgctctcttgtgcagcttgctgcatgctaggtgtcgggtcgcgccgacatccaagaggccatgtttctgtagttagaggctatctcttcaattatagggatacaggtgtacgtgtcgtggcagctaccaaacagccccgagcaagggggcccatccgaaaggatgaaagnnnnnnnnnnnnnnnnnnnnnnn

SEQ ID NO: 76 - DNA, 447 bp, synthetic construct
  source 1..447: mol_type = other DNA; note = MG64-3 putative transposon end LE
aaggcgagtttgggaacggatactcctgggcatttctaactcaacgtggtatcgtcataaatccgagggcgattagcacagtggtagcgcgcttccttcacacggaagaggtcactggttcgaacccagtatcgcccatacatttgtcgaataacgctttatttgtcgtcggtaacacatttgtgtcgtccataacgcttagatgtcatcgataacagttttttgtcaccttctcggtaagtttgccgttaagcgatcgttcacacaatgctgtcgtccaaaattaggcttttgatgtgtgaaggaagcgcgcctttcaatccacctatgcgtatattaacgccaaaacttgatccaagtacaaatgttttaagactgtattctggtctgcatgaaaagctttaggcgtctagatatgagaagccacctaatctacatgcggtcgac

SEQ ID NO: 77 - DNA, 430 bp, synthetic construct
  source 1..430: mol_type = other DNA; note = MG64-3 putative transposon end RE
ggagtcatgcagtacaagtgaattaaatcaaatgtactatgactaccaagatatgtcatctaatttgttagatccgataaagccgccaagaggcgacaaagagtgtgttaatgccaaggtgatctcagattccaagagacgacactgattgtgttcaacttccaagagacgtcagttattctgttagtcaaagagactcattgagatatgagtggaaacgctgaagagtctgatctgaattggttctggctatctcaagctcgatgacaagattgcgttatgacgacattttacgtgttactcgacaacagcggctgacggtggcaccctcagcaattttctcttccacaaagtcgggatcatctgaccccgtgacgaagggccgccagggacgtataccatgtcactgaggcagcaagatagggatcaa

SEQ ID NO: 78 - DNA, 450 bp, synthetic construct
  source 1..450: mol_type = other DNA; note = MG64-5 putative transposon end LE
ttgagacgaaggttgatatctatcgagccgtaactgcttgagctgagttttcaacctctaagcgcaagaaaaaacgactcgtaattcgcgaaaaacgcacatatgaactttcgacttccgatttgcgaaaaatgactttgcgactcgcaatctgcgaatctgtacttgtttactgatttcgggttggagtgccaaaactctctctgggcagggactttacggattatttacaagcgatattaatctgcgaatcgcgacatttaatgtgcgaacgtacaccagatttaaaggattaatttcccaaaaaacacggaagaataggcattttagccgtcaaaccgctattacagtcggtcaattgatgttaaatccgccatttttgccagatttaaggaattagtttccaaaatcctaggccctagttggatgttgggtgcgatcgcagcgctc

SEQ ID NO: 79 - DNA, 583 bp, synthetic construct
  source 1..583: mol_type = other DNA; note = MG64-5 putative transposon end RE
tttagttgtcgcaaagacaactgtaaaagtggtatcacaggtgccctggaatcgtcaaaccctctctattagatcctttttgcttgttttgcggtctgatcaggatcagatttatcgattccaagcttgtcataatgacaattaacgaatagcgatatacgtatacgtacatcgacatgttgatagttgctcacccacacagtggccgcgagcgacttaccgaaaggctcctaggtgtttgtgagtggtattggaaagcagcaaaagcgatcgcaccccctaatggagtctgccgaaacaggcgcaaaacaaagatggcgacgattgcagaaacgcctgacagcagcagccgaggatgggaatactaggctgctaatgtcgatcgcccacaagtacccaaatgcctgaaacccacatcaccgttggagcccatcaagattttgagacttacctgacggaacctttcggtgacgggcctgccagtgatgaacgtgcggccgactttagaaataggctgaaatcagcccagacgctccaagatgctggtttgccaatagtcgaaaatgttttggttggtcgctga

SEQ ID NO: 80 - protein, 803 aa, synthetic construct
  source 1..803: note = MG64-1 effector - MG64-1-Q fusion
MSQITIQCRLVAKEPIRHTLWQLMADLNTPFINELLQKVAQHPDFEKWKQRGRLKVKVIEQLGNELKKDPRFLGQPARFYTSGINLVKYIFKSWLKLQQRLQQKLDRKRRWLEVLKSDDQLIKDGQTDLETIRQKATEILQSYEGTEQLFNTLFQAYNSEEDILTRTALNYLLKNRCKLPQKPEDAKKFAKRRRQVEIAIKRLQEQIKARLPQGRDVTNENWLETLNLACYTDPENIEEARSWQDKLLTKSSSIPFPINYETNEDLIWSKNEKGHLCVQFNGISDLKFKIYCDKRQLKWFQRFYEDQQIKKSNNNQHSSALFTLRSGRILWQEDKGKGQLWDIHRLTLQCTLDTRTWTQEGTEQVKEEKADEIAGILTRMNEKGDLTKNQQAFIQRKQSTLDKLENPFPRPSRPVYRGQSNILLGVSMELKKPATIAVIDGMTRKVLTYRNIKQLLGKNYPLLNRQRRQKQLQSHQRNVAQRKEAFNQFGDSELGEYIDRLLAKAIIAIAKQYQARSIVVPHLKDIREAIQSEIQALAEAKIPNCIEAQAEYAKKYRIQVHQWSYGRLIDNIQAQASKLGIVIEESQQPLQGTPLQKAAELAFKAYQSRLSAGGGSGGGSGGGSGGGSGGGSMESREIQPWWFLVEPLAGESISHFLGRFRRENELTVTMMGKITGLGGTITRWEKFRFIPIPTEEELTALSEVVQVEVERLWQMFPPKGVGMKHQPIRLCGACYEEERCHKIEWQLKTTQFCSQHGLTLLSECPNCGARFQFPALWVNGWCHRCFLTFGEMVEGQSNKKKYL

SEQ ID NO: 81 - protein, 803 aa, synthetic construct
  source 1..803: note = MG64-1-Q - MG64-1 effector fusion
MESREIQPWWFLVEPLAGESISHFLGRFRRENELTVTMMGKITGLGGTITRWEKFRFIPIPTEEELTALSEVVQVEVERLWQMFPPKGVGMKHQPIRLCGACYEEERCHKIEWQLKTTQFCSQHGLTLLSECPNCGARFQFPALWVNGWCHRCFLTFGEMVEGQSNKKKYLGGGSGGGSGGGSGGGSGGGSMSQITIQCRLVAKEPIRHTLWQLMADLNTPFINELLQKVAQHPDFEKWKQRGRLKVKVIEQLGNELKKDPRFLGQPARFYTSGINLVKYIFKSWLKLQQRLQQKLDRKRRWLEVLKSDDQLIKDGQTDLETIRQKATEILQSYEGTEQLFNTLFQAYNSEEDILTRTALNYLLKNRCKLPQKPEDAKKFAKRRRQVEIAIKRLQEQIKARLPQGRDVTNENWLETLNLACYTDPENIEEARSWQDKLLTKSSSIPFPINYETNEDLIWSKNEKGHLCVQFNGISDLKFKIYCDKRQLKWFQRFYEDQQIKKSNNNQHSSALFTLRSGRILWQEDKGKGQLWDIHRLTLQCTLDTRTWTQEGTEQVKEEKADEIAGILTRMNEKGDLTKNQQAFIQRKQSTLDKLENPFPRPSRPVYRGQSNILLGVSMELKKPATIAVIDGMTRKVLTYRNIKQLLGKNYPLLNRQRRQKQLQSHQRNVAQRKEAFNQFGDSELGEYIDRLLAKAIIAIAKQYQARSIVVPHLKDIREAIQSEIQALAEAKIPNCIEAQAEYAKKYRIQVHQWSYGRLIDNIQAQASKLGIVIEESQQPLQGTPLQKAAELAFKAYQSRLSA

SEQ ID NO: 82 - protein, 831 aa, synthetic construct
  source 1..831: note = MG64-1-Q- 48aa Linker- MG64-1 effector fusion
MESREIQPWWFLVEPLAGESISHFLGRFRRENELTVTMMGKITGLGGTITRWEKFRFIPIPTEEELTALSEVVQVEVERLWQMFPPKGVGMKHQPIRLCGACYEEERCHKIEWQLKTTQFCSQHGLTLLSECPNCGARFQFPALWVNGWCHRCFLTFGEMVEGQSNKKKYLGGGSGGGSGGGSGGGSGGGSGGGSGGGSGGGSGGGSGGGSGGGSGGGSMSQITIQCRLVAKEPIRHTLWQLMADLNTPFINELLQKVAQHPDFEKWKQRGRLKVKVIEQLGNELKKDPRFLGQPARFYTSGINLVKYIFKSWLKLQQRLQQKLDRKRRWLEVLKSDDQLIKDGQTDLETIRQKATEILQSYEGTEQLFNTLFQAYNSEEDILTRTALNYLLKNRCKLPQKPEDAKKFAKRRRQVEIAIKRLQEQIKARLPQGRDVTNENWLETLNLACYTDPENIEEARSWQDKLLTKSSSIPFPINYETNEDLIWSKNEKGHLCVQFNGISDLKFKIYCDKRQLKWFQRFYEDQQIKKSNNNQHSSALFTLRSGRILWQEDKGKGQLWDIHRLTLQCTLDTRTWTQEGTEQVKEEKADEIAGILTRMNEKGDLTKNQQAFIQRKQSTLDKLENPFPRPSRPVYRGQSNILLGVSMELKKPATIAVIDGMTRKVLTYRNIKQLLGKNYPLLNRQRRQKQLQSHQRNVAQRKEAFNQFGDSELGEYIDRLLAKAIIAIAKQYQARSIVVPHLKDIREAIQSEIQALAEAKIPNCIEAQAEYAKKYRIQVHQWSYGRLIDNIQAQASKLGIVIEESQQPLQGTPLQKAAELAFKAYQSRLSA

SEQ ID NO: 83 - protein, 851 aa, synthetic construct
  source 1..851: note = MG64-1-Q- 68aa Linker- MG64-1 effector fusion
MESREIQPWWFLVEPLAGESISHFLGRFRRENELTVTMMGKITGLGGTITRWEKFRFIPIPTEEELTALSEVVQVEVERLWQMFPPKGVGMKHQPIRLCGACYEEERCHKIEWQLKTTQFCSQHGLTLLSECPNCGARFQFPALWVNGWCHRCFLTFGEMVEGQSNKKKYLGGGSGGGSGGGSGGGSGGGSGGGSGGGSGGGSGGGSGGGSGGGSGGGSGGGSGGGSGGGSGGGSGGGSMSQITIQCRLVAKEPIRHTLWQLMADLNTPFINELLQKVAQHPDFEKWKQRGRLKVKVIEQLGNELKKDPRFLGQPARFYTSGINLVKYIFKSWLKLQQRLQQKLDRKRRWLEVLKSDDQLIKDGQTDLETIRQKATEILQSYEGTEQLFNTLFQAYNSEEDILTRTALNYLLKNRCKLPQKPEDAKKFAKRRRQVEIAIKRLQEQIKARLPQGRDVTNENWLETLNLACYTDPENIEEARSWQDKLLTKSSSIPFPINYETNEDLIWSKNEKGHLCVQFNGISDLKFKIYCDKRQLKWFQRFYEDQQIKKSNNNQHSSALFTLRSGRILWQEDKGKGQLWDIHRLTLQCTLDTRTWTQEGTEQVKEEKADEIAGILTRMNEKGDLTKNQQAFIQRKQSTLDKLENPFPRPSRPVYRGQSNILLGVSMELKKPATIAVIDGMTRKVLTYRNIKQLLGKNYPLLNRQRRQKQLQSHQRNVAQRKEAFNQFGDSELGEYIDRLLAKAIIAIAKQYQARSIVVPHLKDIREAIQSEIQALAEAKIPNCIEAQAEYAKKYRIQVHQWSYGRLIDNIQAQASKLGIVIEESQQPLQGTPLQKAAELAFKAYQSRLSA

SEQ ID NO: 84 - protein, 855 aa, synthetic construct
  source 1..855: note = MG64-1-Q- 72aa Linker- MG64-1 effector fusion
MESREIQPWWFLVEPLAGESISHFLGRFRRENELTVTMMGKITGLGGTITRWEKFRFIPIPTEEELTALSEVVQVEVERLWQMFPPKGVGMKHQPIRLCGACYEEERCHKIEWQLKTTQFCSQHGLTLLSECPNCGARFQFPALWVNGWCHRCFLTFGEMVEGQSNKKKYLGGGSGGGSGGGSGGGSGGGSGGGSGGGSGGGSGGGSGGGSGGGSGGGSGGGSGGGSGGGSGGGSGGGSGGGSMSQITIQCRLVAKEPIRHTLWQLMADLNTPFINELLQKVAQHPDFEKWKQRGRLKVKVIEQLGNELKKDPRFLGQPARFYTSGINLVKYIFKSWLKLQQRLQQKLDRKRRWLEVLKSDDQLIKDGQTDLETIRQKATEILQSYEGTEQLFNTLFQAYNSEEDILTRTALNYLLKNRCKLPQKPEDAKKFAKRRRQVEIAIKRLQEQIKARLPQGRDVTNENWLETLNLACYTDPENIEEARSWQDKLLTKSSSIPFPINYETNEDLIWSKNEKGHLCVQFNGISDLKFKIYCDKRQLKWFQRFYEDQQIKKSNNNQHSSALFTLRSGRILWQEDKGKGQLWDIHRLTLQCTLDTRTWTQEGTEQVKEEKADEIAGILTRMNEKGDLTKNQQAFIQRKQSTLDKLENPFPRPSRPVYRGQSNILLGVSMELKKPATIAVIDGMTRKVLTYRNIKQLLGKNYPLLNRQRRQKQLQSHQRNVAQRKEAFNQFGDSELGEYIDRLLAKAIIAIAKQYQARSIVVPHLKDIREAIQSEIQALAEAKIPNCIEAQAEYAKKYRIQVHQWSYGRLIDNIQAQASKLGIVIEESQQPLQGTPLQKAAELAFKAYQSRLSA

SEQ ID NO: 85 - protein, 860 aa, synthetic construct
  source 1..860: note = MG64-1-Q- 77aa Linker- MG64-1 effector fusion
MESREIQPWWFLVEPLAGESISHFLGRFRRENELTVTMMGKITGLGGTITRWEKFRFIPIPTEEELTALSEVVQVEVERLWQMFPPKGVGMKHQPIRLCGACYEEERCHKIEWQLKTTQFCSQHGLTLLSECPNCGARFQFPALWVNGWCHRCFLTFGEMVEGQSNKKKYLGTKYLGGGSGGGSGGGSGGGSGGGSGGGSGGGSGGGSGGGSGGGSGGGSGGGSGGGSGGGSGGGSGGGSGGGSGGGSMSQITIQCRLVAKEPIRHTLWQLMADLNTPFINELLQKVAQHPDFEKWKQRGRLKVKVIEQLGNELKKDPRFLGQPARFYTSGINLVKYIFKSWLKLQQRLQQKLDRKRRWLEVLKSDDQLIKDGQTDLETIRQKATEILQSYEGTEQLFNTLFQAYNSEEDILTRTALNYLLKNRCKLPQKPEDAKKFAKRRRQVEIAIKRLQEQIKARLPQGRDVTNENWLETLNLACYTDPENIEEARSWQDKLLTKSSSIPFPINYETNEDLIWSKNEKGHLCVQFNGISDLKFKIYCDKRQLKWFQRFYEDQQIKKSNNNQHSSALFTLRSGRILWQEDKGKGQLWDIHRLTLQCTLDTRTWTQEGTEQVKEEKADEIAGILTRMNEKGDLTKNQQAFIQRKQSTLDKLENPFPRPSRPVYRGQSNILLGVSMELKKPATIAVIDGMTRKVLTYRNIKQLLGKNYPLLNRQRRQKQLQSHQRNVAQRKEAFNQFGDSELGEYIDRLLAKAIIAIAKQYQARSIVVPHLKDIREAIQSEIQALAEAKIPNCIEAQAEYAKKYRIQVHQWSYGRLIDNIQAQASKLGIVIEESQQPLQGTPLQKAAELAFKAYQSRLSA

SEQ ID NO: 86 - protein, 16 aa, synthetic construct
  source 1..16: note = Nucleoplasmin NLS
KRPAATKKAGQAKKKK

SEQ ID NO: 87 - protein, 19 aa, synthetic construct
  source 1..19: note = SV40 2x NLS
PKKKRKVDGSPKKKRKVDS

SEQ ID NO: 88 - protein, 19 aa, synthetic construct
  source 1..19: note = P2A
ATNFSLLKQAGDVEENPGP

SEQ ID NO: 89 - protein, 18 aa, synthetic construct
  source 1..18: note = T2A
EGRGSLLTCGDVEENPGP

SEQ ID NO: 90 - protein, 9 aa, synthetic construct
  source 1..9: note = HA
YPYDVPDYA

SEQ ID NO: 91 - protein, 10 aa, synthetic construct
  source 1..10: note = Myc
EQKLISEEDL

SEQ ID NO: 92 - protein, 8 aa, synthetic construct
  source 1..8: note = FLAG
DYKDDDDK

SEQ ID NO: 93 - DNA, 486 bp, synthetic construct
  source 1..486: mol_type = other DNA; note = MG64-1 active transposon end LE
ctggctaatgcacccagtaaggcagcggtatcatcaacggggtctgacgctcagtggaacgaaaactcacgttaggctctcttaaggaaatctatgtaagtttgttgggttagttgcgttttcagtaaatactgtgttatagtaagaacttgtgcggacgtatagctcagttggttagagtacatcgttgacatcgatggggtcactggttcgagtccagttacgtccatatttttttgaagtgtgtataatattaactatgtgactttatgtacattaacagattatttgtcatcggtaacaaattgttgtcatcttaacaaaatatttgtcatcaataacatattatgtgtcgtgtgcttattactgaaactaatcctagacgatggtaaaaaatagaacacatttccccgaaaagtgccacctgacgtctaagaaaccattattatcatgacattaacctataaaaataggcgtatcacgagg

SEQ ID NO: 94 - RNA, 199 nt, synthetic construct
  source 1..199: mol_type = other RNA; note = MG64-3 effector putative tracrRNA
tgcagcgcctaagttcatgtcgtcagcggcctctgtgcttagaaaaagggctagtttgactgtctgaacgcagtcttgctttctgacctagataactgtccatccccaaagctgtgagcgcacgcagcaagagggcacgggttccggagtgatggttatcaaattcacctccgagcaaggaggaatccacccaaaactt

SEQ ID NO: 95 - RNA, 237 nt, synthetic construct
  source 1..237: mol_type = other RNA; note = MG64-5 effector putative tracrRNA
tcttgtgcgcgccggttctttagggactgagcgataagttagggcgagtttaattgctttccagcccgtgtagttgtccgctctcttgtgcagcttgctgcatgctaggtgtcgggtcgcgccgacatccaagaggccatgtttctgtagttagaggctatctcttcaattatagggatacaggtgtacgtgtcgtggcagctaccaaacagccccgagcaagggggcccatccaaa

SEQ ID NO: 96 - RNA, 239 nt, synthetic construct; identical to SEQ ID NO: 68
  source 1..239: mol_type = other RNA; note = MG64-1 active effector engineered sgRNA 11

SEQ ID NO: 97 - RNA, 245 nt, synthetic construct; identical to SEQ ID NO: 69
  source 1..245: mol_type = other RNA; note = MG64-1 active effector engineered sgRNA 12

SEQ ID NO: 98 - RNA, 250 nt, synthetic construct; identical to SEQ ID NO: 70
  source 1..250: mol_type = other RNA; note = MG64-1 active effector engineered sgRNA 13

SEQ ID NO: 99 - RNA, 248 nt, synthetic construct; identical to SEQ ID NO: 71
  source 1..248: mol_type = other RNA; note = MG64-1 active effector engineered sgRNA 14

SEQ ID NO: 100 - RNA, 263 nt, synthetic construct; identical to SEQ ID NO: 72
  source 1..263: mol_type = other RNA; note = MG64-1 active effector engineered sgRNA v2-1

SEQ ID NO: 101 - RNA, 262 nt, synthetic construct; identical to SEQ ID NO: 73
  source 1..262: mol_type = other RNA; note = MG64-1 active effector engineered sgRNA 20

SEQ ID NO: 102 - RNA, 241 nt, synthetic construct; identical to SEQ ID NO: 74
  source 1..241: mol_type = other RNA; note = MG64-3 effector sgRNA

SEQ ID NO: 103 - RNA, 264 nt, synthetic construct; identical to SEQ ID NO: 75
  source 1..264: mol_type = other RNA; note = MG64-5 effector sgRNA

SEQ ID NO: 104 - RNA, 199 nt, synthetic construct; identical to SEQ ID NO: 94
  source 1..199: mol_type = other RNA; note = MG64-3 effector putative tracrRNA sequence

SEQ ID NO: 105 - RNA, 237 nt, synthetic construct; identical to SEQ ID NO: 95
  source 1..237: mol_type = other RNA; note = MG64-5 effector putative tracrRNA sequence

SEQ ID NO: 106 - RNA, 38 nt, synthetic construct
  source 1..38: mol_type = other RNA; note = MG64-1 active effector's crRNA sequence
cgtcacaatctattttggttaatgagatggattgaaag

SEQ ID NO: 107 - RNA, 37 nt, synthetic construct
  source 1..37: mol_type = other RNA; note = MG64-3 effector crRNA sequence
gtcgcccaaggcatttcagggcagggcggattgaaag

SEQ ID NO: 108 - RNA, 37 nt, synthetic construct
  source 1..37: mol_type = other RNA; note = MG64-5 effector crRNA sequence
gtttcatccctgcatttcaatgcagatgggatgaaag

SEQ ID NO: 109 - protein, 940 aa, unidentified
  source 1..940: note = MG64-42-B transposition protein
MRHCAQPGFTDVLSEQEWRAFTGQLKFSQETVRRISDIRTKPPARVVSGGRKNVSGRYPSKKMGLTIQFESHRVELARVIQLEFDPDVLEYYDQPSGVVDLIYKSKSGRTVRTSSTPDYFVIRKSGAGWEECKPEAKLIELAEKQPNRYHRDETGVWRCPPGEEYAARFGLAFRVWSDADVSWEFQDNANFLDDYWRYEYPEIDPHTVASVQQVVEDHREISLAELLAADTGATTDDIYALIATQKIYVDLYKARLSNPHDVKVFLTRNIASTYTQALEVSDIGKPEGFQRVTVSIGKRINWDGQVWEIINTGSTKTSLQPADGPIMQIPNGQLDALIEAGEISALQPSSDQDDRQDVIKEILSQTSPRDMEKARQRYEEIEPYLGELAPTCPSKTIKRWRDRYLAAEKKYGNGFVGLIPKHCQKGNYTPKIAPELQEYMDVYIQRHYETIKQRNAYSVYRSFKLQLEEDHPGWIAPSHVSFNKAIKKRSGLKQTLRRKGRRAAIQKEPMYWELTLKTPRHGSRPFEVAHIDHTPMDIELVASLEALSQCSRVVDGLTKPQELAKQAWLSVMIDAFSRKILAAYVSYESPSYRTCMMVMRICVRRFKRLPQTIVVDNGSEFHSNYFSQLAAFYQITLKYRPPAYARFGTLVERIFDTANQRLFYNLLGNTQARKERQTTKTVDPKRNAVWNLPDLYKDLCKLLYELYDNTVHQTLDQTPNEAFTNGLTIGGAREHRRVEYDENFKLLTLAVPTGDKRKVDTCRGIKMFNIRYWSDHFRDPDLEQKEYCNVEVRYDPFNIGIAYAFVKKQWVKCTSSYYQVLNGRTEKEIQLASEEIRKRKRANGKKVEVTDRELADFLRSVEEHEGLLQERRKAIDNKAILRAIDGGLDTKKSPEFECEATGTPYSRILPDPEESKTLDLPIFEPKPEPEEEAFEDYGEY

SEQ ID NO: 110 - protein, 378 aa, unidentified
  source 1..378: note = MG64-42-C transposition protein
MPTENQFPEELLAAPIEQRISYFEDFTIAHPNLLKAAEKLTTSLNEPVGSAIIFLFGPTGVGKTTLLMRTIQRLTEQFLAEYEKDKSCLPFAGFEAPAPELRSFSWKSVYVRALEALRNPLIDREDHLLARINGVHSTKDRLRLLLEKDLHYRHPKLFYIDEAQNFGKVSNAKHFKDQADCIKSISNLAGVPILLVGTYELLYLRNRSAQLARRSTDIHYPRYRVNTSNDEKVFKNIVHKFQRNLPLEEQPNLTANWDFCYERSLGCVGILKDWLSRTLAGTLVNNSHAKTITLSDLEKYAYSLNICSIMLREIREEEKVLEESVSRNDLRLQLGLNTIEEVKPKTQVKPPQEKSFKRKRVGEPNPKRRKIGDAQDAS

SEQ ID NO: 111 - protein, 267 aa, unidentified
  source 1..267: note = MG64-42-Q transposition protein
MKLQKLSIPEPSKLYSLKPEGLGTPEVESLASYTMRLAEAHCLDVCNLIHLFVHPLIKNEWKDTHARGFNKFHKVYRHTVTPAHLHAGKWLDMTKETEATVAALSKLTKRQELKLLTTLPLSNLVQQKTVLRYRRAWCPCCYDEQKEAGKPIHDLLIWSFKDVITCHKHDQILWSCCTWCVAKQHPLSYWSRPGHCTKCGLWLGKNRKHFARATYFDNWKAQALGELAADFDNLPAQRPRRRPTIQKLLHESFTTDVSIKDLLSRIA

SEQ ID NO: 112 - RNA, 37 nt, synthetic construct; identical to SEQ ID NO: 107
  source 1..37: mol_type = other RNA

SEQ ID NO: 113 - RNA, 37 nt, synthetic construct; identical to SEQ ID NO: 107
  source 1..37: mol_type = other RNA

SEQ ID NO: 114 - RNA, 38 nt, synthetic construct
  source 1..38: mol_type = other RNA
ggtttcatccctgcatttcagtgctgatgggatgaaag

SEQ ID NO: 115 - RNA, 30 nt, synthetic construct
  source 1..30: mol_type = other RNA
ctcaataggcttctcgttgctatttgaaag

SEQ ID NO: 116 - RNA, 34 nt, synthetic construct
  source 1..34: mol_type = other RNA
gatcgccccttcttccagagggaggttgaaagga

SEQ ID NO: 117 - RNA, 38 nt, synthetic construct
  source 1..38: mol_type = other RNA
gtcgcaatgggccttgaccgccgatgaggattgaaaca

SEQ ID NO: 118 - RNA, 37 nt, synthetic construct
  source 1..37: mol_type = other RNA
gtcgcccaaggcatttcagggcagcgcggattgaaag

SEQ ID NO: 119 - RNA, 277 nt, synthetic construct; identical to SEQ ID NO: 6
  source 1..277: mol_type = other RNA

SEQ ID NO: 120 - RNA, 98 nt, synthetic construct
  source 1..98: mol_type = other RNA
attgccctagcgccgttgttcaagttccatgaaccgctgaacctcgaaaaatgtgggtctgtttggttgctgtgaagcgactgttctttccggccctt

SEQ ID NO: 121 - RNA, 78 nt, synthetic construct
  source 1..78: mol_type = other RNA
tgtacaaaagcgccgcagatcatgcgcaagcctctgttctgtgaaaaatgagggtttgtttgactgtgtgatagcggt

SEQ ID NO: 122 - RNA, 196 nt, synthetic construct
  source 1..196: mol_type = other RNA
ataaatgcagcgcctaagttcatgtcgtcagcggcctctgtgcttagaaaaagggctagtttgactgtctgaacgcagtcttgctttctgacctagataactgtccatccccaaagctgtgagcgcacgcagcaagagggcacgggttccggagtgatggttatcaaattcacctccgagcaaggaggaatccacc

SEQ ID NO: 123 - RNA, 173 nt, synthetic construct
  source 1..173: mol_type = other RNA
gaattaatagcgccgccgttcatgcttctaggagcctctgaaaggtgacaaatgcgggttagtttggctgttgtcagacagtcttgctttctgaccctggtagctgcccaccccgaagctgctgttccttgtgaacaggaattaggtgcgcccccagtaataagggtatgggt

SEQ ID NO: 124 - RNA, 68 nt, synthetic construct
  source 1..68: mol_type = other RNA
gttaccacagtggtggctactgaatcacctccgagcaaggaggaacccactgaaaggtgggttgaaag

SEQ ID NO: 125 - RNA, 180 nt, synthetic construct
  source 1..180: mol_type = other RNA
gaattaatagcgccgccgttcatgcttctaggagcctctgaaaggtgacaaatgcgggttagtttggctgttgtcagacagtcttgctttctgaccctggtagctgcccaccccgaagctgctgttccttgtgaacaggaattaggtgcgcccccagtaataagggtatgggtttaccac

SEQ ID NO: 126 - RNA, 61 nt, synthetic construct
  source 1..61: mol_type = other RNA
gagtggtggctactgaatcacctccgagcaaggaggaacccactgaaaggtgggttgaaag

SEQ ID NO: 127 - RNA, 104 nt, synthetic construct
  source 1..104: mol_type = other RNA
gaattaatagcgccgccgttcatgcttctaggagcctctgaaaggtgacaaatgcgggttagtttggctgttgtcagacagtcttgctttctgaccctggtagc

SEQ ID NO: 128 - RNA, 137 nt, synthetic construct
  source 1..137: mol_type = other RNA
gtgcccaccccgaagctgctgttccttgtgaacaggaattaggtgcgcccccagtaataagggtatgggtttaccacagtggtggctactgaatcacctccgagcaaggaggaacccactgaaaggtgggttgaaag

SEQ ID NO: 129 - RNA, 115 nt, synthetic construct
  source 1..115: mol_type = other RNA
gaattaatagcgccgccgttcatgcttctaggagcctctgaaaggtgacaaatgcgggttagtttggctgttgtcagacagtcttgctttctgaccctggtagctgcccaccccg

SEQ ID NO: 130 - RNA, 126 nt, synthetic construct
  source 1..126: mol_type = other RNA
gaagctgctgttccttgtgaacaggaattaggtgcgcccccagtaataagggtatgggtttaccacagtggtggctactgaatcacctccgagcaaggaggaacccactgaaaggtgggttgaaag

SEQ ID NO: 131 - RNA, 129 nt, synthetic construct
  source 1..129: mol_type = other RNA
gaattaatagcgccgccgttcatgcttctaggagcctctgaaaggtgacaaatgcgggttagtttggctgttgtcagacagtcttgctttctgaccctggtagctgcccaccccgaagctgctgttcct

SEQ ID NO: 132 - RNA, 112 nt, synthetic construct
  source 1..112: mol_type = other RNA
gtgtgaacaggaattaggtgcgcccccagtaataagggtatgggtttaccacagtggtggctactgaatcacctccgagcaaggaggaacccactgaaaggtgggttgaaag

SEQ ID NO: 133 - RNA, 132 nt, synthetic construct
  source 1..132: mol_type = other RNA
aattaatagcgccgccgttcatgcttctaggagcctctgaaaggtgacaaatgcgggttagtttggctgttgtcagacagtcttgctttctgaccctggtagctgcccaccccgaagctgctgttcggtcgg

SEQ ID NO: 134 - RNA, 137 nt, synthetic construct
  source 1..137: mol_type = other RNA
ccgaccgaacaggaattaggtgcgcccccagtaataagggtatgggtttaccacagtggtggctactgaatcacctccgagcaaggaggaacccactgaaaggtgggttgaaagnnnnnnnnnnnnnnnnnnnnnnn

SEQ ID NO: 135 - RNA, 204 nt, synthetic construct
  source 1..204: mol_type = other RNA
gaattaatagcgccgccgttcatgcttctaggagcctctgaaaggtgacaaatgcgggttagtttggctgttgtcagacagtcttgctttctgaccctggtagctgcccaccccgaagctgctgttccttgtgaacaggaattaggtgcgcccccagtaataagggtatgggtttaccacagtggtggctactgaatcagaaag

SEQ ID NO: 136 - RNA, 194 nt, synthetic construct
  source 1..194: mol_type = other RNA
gaattaatagcgccgccgttcatgcttctaggagcctctgaaaggtgacaaatgcgggttagtttggctgttgtcagacagtcttgctttctgaccctggtagctgcccacccgaaagggtatgggtttaccacagtggtggctactgaatcacctccgagcaaggaggaacccactgaaaggtgggttgaaag

SEQ ID NO: 137 - RNA, 219 nt, synthetic construct
  source 1..219: mol_type = other RNA
gcgccgccgttcagaaatgaaaggtgacaaatgcgggttagtttggctgttgtcagacagtcttgctttctgaccctggtagctgcccaccccgaagctgctgttccttgtgaacaggaattaggtgcgcccccagtaataagggtatgggtttaccacagtggtggctactgaatcacctccgagcaaggaggaacccactgaaaggtgggttgaaag

SEQ ID NO: 138 - RNA, 224 nt, synthetic construct
  source 1..224: mol_type = other RNA
gaattaatagcgccgccgttcatgcttctaggagcctctgaaaggtgacaaatgcgggttagtttggctgttgtcagacagtcttgctttctgaccctggtagctgcccaccccgaagctgctgttccttgtgaacagcagtaataagggtatgggtttaccacagtggtggctactgaatcacctccgagcaaggaggaacccactgaaaggtgggttgaaag

SEQ ID NO: 139 - RNA, 234 nt, synthetic construct
  source 1..234: mol_type = other RNA
gaattaatagcgccgccgttcatgcttctaggagcctctgaaaggtgacaaatgcgggttagttttgttagacagtcttgctttctgaccctggtagctgcccaccccgaagctgctgttccttgtgaacaggaattaggtgcgcccccagtaataagggtatgggtttaccacagtggtggctactgaatcacctccgagcaaggaggaacccactgaaaggtgggttgaaag

SEQ ID NO: 140 - RNA, 221 nt, synthetic construct
  source 1..221: mol_type = other RNA
gaattaatagcgccgccgttcatgcttctaggagcctctgaaaggtgacaaatgcgggttagtttggctgttgtcagacagtcttgctttctgaccctggtagctgcccaccccgaagctgctgttccttgtgaacaggaattaggtgcgcccccagtaataagggtatgggtttaccacagtggtggctactgaatcacctccgagcaaggaggagaaag

SEQ ID NO: 141 - DNA, 335 bp, synthetic construct
  source 1..335: mol_type = other DNA
aatgctcatcatcactggccatcagagaaatgcaaatcaaaaccactatgagatatcatctcacaccagttagaatggcaatcattaaaaagtcaggaaacaacaggtgctggagaggatgcggagaaataggaacacttttacactgttggtgggactgtaaactagttcaaccattgtggaagtcagtgtggcgattcctcagggatctagaactagaaataccatttgacccagccatcccattactgggtatatacccaaaggactataaatcatgctgctataaagacacatgcacacgtatgtttattgcggcactattcacaatagca

SEQ ID NO: 142 - DNA, 485 bp, synthetic construct
  source 1..485: mol_type = other DNA
ctctccctctccctctccctctccctctccctctccctctccctctcccctccctccacggtctccctctgatgccgagccaaagctggacggtactgctgccatctcggctcactgcaacctccctgcctgattctcctgcctcagcctgccgagtgcctgcgattgcaggcgcgcgccgccacgcctgactggttttcgtttttttttggtggagacggggtctcgctgtgttgnccgggctggtctccagctcctggccgcgagtgatccgccngcctcggcctcccgaggtgccgggattgcagacggagtctcgttcactcagtgctcaatggtgcccaggctggagtgcagtggcgtgatctcggctcgctacaaccacctcccagccgcctgccttggcctcccaaagagccggattgcagcctctgcccggccgccgccccgtccgggaggtgaggagcgcctctgcccggccgccc

SEQ ID NO: 143 - DNA, 323 bp, synthetic construct
  source 1..323: mol_type = other DNA
ttcaaccggcagctgaccaggccaagtcctcccccttctcgtggttaactttaatctcagaaggtgcacaattgctccaatccacaggggtacaaaacctctcccactgcttcctctgtgcagccctcggaagacctcccttagtagcagttcctctccctaccccctttaattatacaagaaattcatccacccctataccaccggtcccgaaaggacaggtcccactattctcagaccctacaagacacaagttcccgttctgttactctaccccaaatgcctcttggtgtaaccagaccaggatgcttaccagcgccccg

SEQ ID NO: 144 - DNA, 24 bp, synthetic construct
  source 1..24: mol_type = other DNA
atgggatggctgggtcaaatggta

SEQ ID NO: 145 - DNA, 24 bp, synthetic construct
  source 1..24: mol_type = other DNA
aaatggtatttctagttctagatc

SEQ ID NO: 146 - DNA, 24 bp, synthetic construct
  source 1..24: mol_type = other DNA
gaactagtttacagtcccaccaac

SEQ ID NO: 147 - DNA, 24 bp, synthetic construct
  source 1..24: mol_type = other DNA
tatacccagtaatgggatggctgg

SEQ ID NO: 148 - DNA, 24 bp, synthetic construct
  source 1..24: mol_type = other DNA
aggaaacaacaggtgctggagagg

SEQ ID NO: 149 - DNA, 24 bp, synthetic construct
  source 1..24: mol_type = other DNA
tacagtcccaccaacagtgtaaaa

SEQ ID NO: 150 - DNA, 23 bp, synthetic construct
  source 1..23: mol_type = other DNA
caccaacagtgtaaaagtgttcc

SEQ ID NO: 151 - DNA, 24 bp, synthetic construct
  source 1..24: mol_type = other DNA
ggactgtaaactagttcaaccatt

SEQ ID NO: 152 - DNA, 24 bp, synthetic construct
  source 1..24: mol_type = other DNA
tttctagttctagatccctgagga

SEQ ID NO: 153 - DNA, 24 bp, synthetic construct
  source 1..24: mol_type = other DNA
caaccattgtggaagtcagtgtgg

SEQ ID NO: 154 - DNA, 24 bp, synthetic construct
  source 1..24: mol_type = other DNA
tggcgattcctcagggatctagaa

SEQ ID NO: 155 - DNA, 24 bp, synthetic construct
  source 1..24: mol_type = other DNA
ctagatccctgaggaatcgccaca

SEQ ID NO: 156 - DNA, 24 bp, synthetic construct
  source 1..24: mol_type = other DNA
agaatggcaatcattaaaaagtca

SEQ ID NO: 157 - DNA, 24 bp, synthetic construct
  source 1..24: mol_type = other DNA
agtgtggcgattcctcagggatct

SEQ ID NO: 158 - DNA, 24 bp, synthetic construct
  source 1..24: mol_type = other DNA
tatacccaaaggactataaatcat

SEQ ID NO: 159 - DNA, 24 bp, synthetic construct
  source 1..24: mol_type = other DNA
gtagcgagccgagatcacgccact

SEQ ID NO: 160 - DNA, 24 bp, synthetic construct
  source 1..24: mol_type = other DNA
ctcaatggtgcccaggctggagtg

SEQ ID NO: 161 - DNA, 24 bp, synthetic construct
  source 1..24: mol_type = other DNA
cccaggctggagtgcagtggcgtg

SEQ ID NO: 162 - DNA, 24 bp, synthetic construct
  source 1..24: mol_type = other DNA
gcgtgatctcggctcgctacaacc

SEQ ID NO: 163 - DNA, 24 bp, synthetic construct
  source 1..24: mol_type = other DNA
cagtggcgtgatctcggctcgcta

SEQ ID NO: 164 - DNA, 24 bp, synthetic construct
  source 1..24: mol_type = other DNA
tcgttcactcagtgctcaatggtg

SEQ ID NO: 165 - DNA, 24 bp, synthetic construct
  source 1..24: mol_type = other DNA
aacgagactccgtctgcaatcccg

SEQ ID NO: 166 - DNA, 24 bp, synthetic construct
  source 1..24: mol_type = other DNA
cctctccctaccccctttaattat

SEQ ID NO: 167 - DNA, 24 bp, synthetic construct
  source 1..24: mol_type = other DNA
agcatcctggtctggttacaccaa

SEQ ID NO: 168 - DNA, 24 bp, synthetic construct
  source 1..24: mol_type = other DNA
acagaacgggaacttgtgtcttgt

SEQ ID NO: 169 - DNA, 24 bp, synthetic construct
  source 1..24: mol_type = other DNA
gtataggggtggatgaatttcttg

SEQ ID NO: 170 - DNA, 24 bp, synthetic construct
  source 1..24: mol_type = other DNA
taggggtggatgaatttcttgtat

SEQ ID NO: 171 - DNA, 24 bp, synthetic construct
  source 1..24: mol_type = other DNA
gatgaatttcttgtataattaaag

SEQ ID NO: 172 - DNA, 24 bp, synthetic construct
  source 1..24: mol_type = other DNA
acaccaagaggcatttggggtaga

SEQ ID NO: 173 - DNA, 24 bp, synthetic construct
  source 1..24: mol_type = other DNA
taaccagaccaggatgcttaccag

SEQ ID NO: 174 - DNA, 24 bp, synthetic construct
  source 1..24: mol_type = other DNA
tggttacaccaagaggcatttggg

SEQ ID NO: 175 - DNA, 24 bp, synthetic construct
  source 1..24: mol_type = other DNA
gagtaacagaacgggaacttgtgt

SEQ ID NO: 176 - DNA, 24 bp, synthetic construct
  source 1..24: mol_type = other DNA
gggagaggaactgctactaaggga

SEQ ID NO: 177 - DNA, 24 bp, synthetic construct
  source 1..24: mol_type = other DNA
aactttaatctcagaaggtgcaca

SEQ ID NO: 178 - DNA, 24 bp, synthetic construct
  source 1..24: mol_type = other DNA
tgagaatagtgggacctgtccttt

SEQ ID NO: 179 - DNA, 24 bp, synthetic construct
  source 1..24: mol_type = other DNA
ccgaaaggacaggtcccactattc

SEQ ID NO: 180 - DNA, 24 bp, synthetic construct
  source 1..24: mol_type = other DNA
cacaattgctccaatccacagggg

SEQ ID NO: 181 - DNA, 387 bp, synthetic construct
  source 1..387: mol_type = other DNA
atgaagaggcccgcagcgactaagaaagcaggacaggcgaagaagaagaagtacccatatgacgtgccagattatgctggtggcggcggctctggtggtggcggcagcggtggcggcggcagttctctgtcaacggaagcaaccgcaaagattgtatcagagtttggcagagacgcgaacgatacggggagtacggaagtgcaggtcgccctgctcaccgcacaaattaaccaccttcagggacatttcgctgaacataaaaaagatcatcattcgcgcagaggtttgcttcgtatggtgtcgcagcgtagaaaacttttagattatctgaaacggaaagatgtggcacgctatacgcagttaatagaacgactgggtctgcgtcgc

SEQ ID NO: 182 - DNA, 414 bp, synthetic construct
  source 1..414: mol_type = other DNA
atgtctctgtcaacggaagcaaccgcaaagattgtatcagagtttggcagagacgcgaacgatacggggagtacggaagtgcaggtcgccctgctcaccgcacaaattaaccaccttcagggacatttcgctgaacataaaaaagatcatcattcgcgcagaggtttgcttcgtatggtgtcgcagcgtagaaaacttttagattatctgaaacggaaagatgtggcacgctatacgcagttaatagaacgactgggtctgcgtcgcggtggcggcggctctggtggtggcggcagcggtggcggcggcagttatccatatgatgttccagactatgcaggcagcggcagccctaagaagaagcgaaaagtcgacggaagccctaagaagaagcgcaaggtcgacagtggatga

SEQ ID NO: 183 - DNA, 471 bp, synthetic construct
  source 1..471: mol_type = other DNA
ggcgccaccaacttctccctgctgaagcaggccggcgacgtggaggagaaccccggcccctctctgtcaacggaagcaaccgcaaagattgtatcagagtttggcagagacgcgaacgatacggggagtacggaagtgcaggtcgccctgctcaccgcacaaattaaccaccttcagggacatttcgctgaacataaaaaagatcatcattcgcgcagaggtttgcttcgtatggtgtcgcagcgtagaaaacttttagattatctgaaacggaaagatgtggcacgctatacgcagttaatagaacgactgggtctgcgtcgcggtggcggcggctctggtggtggcggcagcggtggcggcggcagttatccatatgatgttccagactatgcaggcagcggcagccctaagaagaagcgaaaagtcgacggaagccctaagaagaagcgcaaggtcgacagtggatga

SEQ ID NO: 184 - DNA, 2514 bp, synthetic construct
  source 1..2514: mol_type = other DNA
tttacagagaaacctcctcacacaaaaggcgtagtgtacattaacagattatttgtcatcggtaacaaattgttgtcatcttaacaaaatatttgtcatcaataacatattatgtgtcgtgtgcttattactgaaactaatcctagacgatggtaaaaaatcctgcaggttaattaaatttaaatcatgtgagcaaaaggccagcaaaaggccaggaaccgtaaaaaggccgcgttgctggcgtttttccataggctccgcccccctgacgagcatcacaaaaatcgacgctcaagtcagaggtggcgaaacccgacaggactataaagataccaggcgtttccccctggaagctccctcgtgcgctctcctgttccgaccctgccgcttaccggatacctgtccgcctttctcccttcgggaagcgtggcgctttctcatagctcacgctgtaggtatctcagttcggtgtaggtcgttcgctccaagctgggctgtgtgcacgaaccccccgttcagcccgaccgctgcgccttatccggtaactatcgtcttgagtccaacccggtaagacacgacttatcgccactggcagcagccactggtaacaggattagcagagcgaggtatgtaggcggtgctacagagttcttgaagtggtggcctaactacggctacactagaagaacagtatttggtatctgcgctctgctgaagccagttaccttcggaaaaagagttggtagctcttgatccggcaaacaaaccaccgctggtagcggtggtttttttgtttgcaagcagcagattacgcgcagaaaaaaaggatctcaagaagatcctttgatcttttctacggggtctgacgctcagtggaacgaaaactcacgttaagggattttggtcatgagattatcaaaaaggatcttcacctagatccttttaaattaaaaatgaagttttaaatcaatctaaagtatatatgagtaaacttggtctgacagttaccaatgcttaatcagtgaggcacctatctcagcgatctgtctatttcgttcatccatagttgcatttaaatggccggcctggcgcgccgtttaaacctagatattgatagtctgatcggtcaacgtataatcgagtcctagcttttgcaaacatctatcaagagacaggatcagcaggaggctttcgcatgagtattcaacatttccgtgtcgcccttattcccttttttgcggcattttgccttcctgtttttgctcacccagaaacgctggtgaaagtaaaagatgctgaagatcagttgggtgcgcgagtgggttacatcgaactggatctcaacagcggtaagatccttgagagttttcgccccgaagaacgctttccaatgatgagcacttttaaagttctgctatgtggcgcggtattatcccgtattgacgccgggcaagagcaactcggtcgccgcatacactattctcagaatgacttggttgagtattcaccagtcacagaaaagcatcttacggatggcatgacagtaagagaattatgcagtgctgccataaccatgagtgataacactgcggccaacttacttctgacaacgattggaggaccgaaggagctaaccgcttttttgcacaacatgggggatcatgtaactcgccttgatcgttgggaaccggagctgaatgaagccataccaaacgacgagcgtgacaccacgatgcctgtagcaatggcaacaaccttgcgtaaactattaactggcgaactacttactctagcttcccggcaacagttgatagactggatggaggcggataaagttgcaggaccacttctgcgctcggcccttccggctggctggtttattgctgataaatctggagccggtgagcgtgggtctcgcggtatcattgcagcactggggccagatggtaagccctcccgtatcgtagttatctacacgacggggagtcaggcaactatggatgaacgaaatagacagatcgctgagataggtgcctcactgattaagcattggtaaccgattctaggtgcattggcgcagaaaaaaatgcctgatgcgacgctgcgcgtcttatactcccacatatgccagattcagcaacggatacggcttccccaacttgcccacttccatacgtgtcctccttaccagaaatttatccttaagaatgaacaaaaatgtctgattattacataattgtttatttaatataattgtatcgtaatacttgaagtttggagacaagtaatttgttaatactgctccagtccctaaaaaagtgccattcgggtaaatgacacttaatctgttaatttactggaaaatgacagttaatttgttaatatagtaagcaataacttttgtcaaagattaatgctataattcagctaaagcagtgattatataaagctttcactctcaaatagttcggcgacacgattttgttaagacgacaaataattagttactgtaca

SEQ ID NO: 185 - RNA, 295 nt, synthetic construct
  source 1..295: mol_type = other RNA
gaaataatcgcgccgtagatcatgttcttgattgaacctctgaactacgaaaaatgagggttagtttgactctcggcagatagtcttgctttctgaccctagtggctgtccaccctgatgctgatttctacaatttaggttgtagagatgattaacctgtaacttgaggttagctaataatttcatcttatagggtaggtgcgctcccagcaataagtggcgtgggtttaccacagtgacggctactgaatcacctccgaccaaggaggaatccactgaaaagatggattgaaag

SEQ ID NO: 186 - DNA, 633 bp, synthetic construct
  source 1..633: mol_type = other DNA
tgactcgagcttattccagatgcgtgcggatggaattcgagctcggtaccatgccaaaagcaaagcgctatcgcgccttacgttactggccgaagccgcttggaataaggccggtgtgcgtttgtctatatgttattttccaccatattgccgtcttttggcaatgtgagggcccggaaacctggccctgtcttcttgacgagcattcctaggggtctttcccctctcgccaaaggaatgcaaggtctgttgaatgtcgtgaaggaagcagttcctctggaagcttcttgaagacaaacaacgtctgtagcgaccctttgcaggcagcggaaccccccacctggcgacaggtgcctctgcggccaaaagccacgtgtataagatacacctgcaaaggcggcacaaccccagtgccacgttgtgagttggatagttgtggaaagagtcaaatggctcccctcaagcgtattcaacaaggggctgaaggatgcccagaaggtaccccattgtatgggatctgatctggggcctcggtgcacatgcttttcatgtgtttagtcgaggttaaaaaacgtctaggccccccgaaccacggggacgtggttttcctttgaaaaacacgatgataataac

SEQ ID NO: 187 - protein, 129 aa, synthetic construct
MKRPAATKKAGQAKKKKYPYDVPDYAGGGGSGGGGSGGGGSSLSTEATAKIVSEFGRDANDTGSTEVQVALLTAQINHLQGHFAEHKKDHHSRRGLLRMVSQRRKLLDYLKRKDVARYTQLIERLGLRR

SEQ ID NO: 188 - protein, 137 aa, synthetic construct
MSLSTEATAKIVSEFGRDANDTGSTEVQVALLTAQINHLQGHFAEHKKDHHSRRGLLRMVSQRRKLLDYLKRKDVARYTQLIERLGLRRGGGGSGGGGSGGGGSYPYDVPDYAGSGSPKKKRKVDGSPKKKRKVDSG

SEQ ID NO: 189 - protein, 156 aa, synthetic construct
GATNFSLLKQAGDVEENPGPSLSTEATAKIVSEFGRDANDTGSTEVQVALLTAQINHLQGHFAEHKKDHHSRRGLLRMVSQRRKLLDYLKRKDVARYTQLIERLGLRRGGGGSGGGGSGGGGSYPYDVPDYAGSGSPKKKRKVDGSPKKKRKVDSG

SEQ ID NO: 190 - DNA, 1305 bp, synthetic construct
  source 1..1305: mol_type = other DNA
aactgctgatcgagtgtagccagatctagtaatcaattacggggtcattagttcatagcccatatatggagttccgcgttacataacttacggtaaatggcccgcctggctgaccgcccaacgacccccgcccattgacgtcaataatgacgtatgttcccatagtaacgccaatagggactttccattgacgtcaatgggtggagtatttacggtaaactgcccacttggcagtacatcaagtgtatcatatgccaagtacgccccctattgacgtcaatgacggtaaatggcccgcctggcattatgcccagtacatgaccttatgggactttcctacttggcagtacatctacgtattagtcatcgctattaccatgctgatgcggttttggcagtacatcaatgggcgtggatagcggtttgactcacggggatttccaagtctccaccccattgacgtcaatgggagtttgttttggcaccaaaatcaacgggactttccaaaatgtcgtaacaactccgccccattgacgcaaatgggcggtaggcgtgtacggtgggaggtctatataagcagagctggtttagtgaaccgtcagatcgcctggagacgccatccacgctgttttgacctccatagaagacaccgggaccgatccagcctcccctcgaagcttacatgtggtaccgagctcggatcctgagaacttcagggtgagtctatgggacccttgatgttttctttccccttcttttctatggttaagttcatgtcataggaaggggagaagtaacagggtacacatattgaccaaatcagggtaattttgcatttgtaattttaaaaaatgctttcttcttttaatatacttttttgtttatcttatttctaatactttccctaatctctttctttcagggcaataatgatacaatgtatcatgcctctttgcaccattctaaagaataacagtgataatttctgggttaaggcaatagcaatatttctgcatataaatatttctgcatataaattgtaactgatgtaagaggtttcatattgctaatagcagctacaatccagctaccattctgcttttattttatggttgggataaggctggattattctgagtccaagctaggcccttttgctaatcatgttcatacctcttatcttcctcccacagctcctgggcaacgtgctggtctgtgtgctggcccatcactttggcaaaggcggccgctgccaagcttccgagctctcgaattcaaaggaggtaccgcgatatctacctcgag

SEQ ID NO: 191 - DNA, 288 bp, synthetic construct
  source 1..288: mol_type = other DNA
caacctacatcctcaatcccaattaaggtcgggcaggaagagggcctatttcccatgattccttcatatttgcatatacgatacaaggctgttagagagataattagaattaatttgactgtaaacacaaagatattagtacaaaatacgtgacgtagaaagtaataatttcttgggtagtttgcagttttaaaattatgttttaaaatggactatcatatgcttaccgtaacttgaaagtatttcgatttcttggctttatatatcttgtggaaaggacgaaacacc

SEQ ID NO: 192 - protein, 7 aa, synthetic construct
PKKKRKV

SEQ ID NO: 193 - protein, 16 aa, synthetic construct
KRPAATKKAGQAKKKK

SEQ ID NO: 194 - protein, 9 aa, synthetic construct
PAAKRVKLD

SEQ ID NO: 195 - protein, 11 aa, synthetic construct
RQRRNELKRSP

SEQ ID NO: 196 - protein, 38 aa, synthetic construct
NQSSNFGPMKGGNFGGRSSGPYGGGGQYFAKPRNQGGY

SEQ ID NO: 197 - protein, 42 aa, synthetic construct
RMRIZFKNKGKDTAELRRRRVEVSVELRKAKKDEQILKRRNV

SEQ ID NO: 198 - protein, 8 aa, synthetic construct
VSRKRPRP

SEQ ID NO: 199 - protein, 8 aa, synthetic construct
PPKKARED

SEQ ID NO: 200 - protein, 8 aa, synthetic construct
PQPKKKPL

SEQ ID NO: 201 - protein, 12 aa, synthetic construct
SALIKKKKKMAP

SEQ ID NO: 202 - protein, 5 aa, synthetic construct
DRLRR

SEQ ID NO: 203 - protein, 7 aa, synthetic construct
PKQKKRK

SEQ ID NO: 204 - protein, 10 aa, synthetic construct
RKLKKKIKKL

SEQ ID NO: 205 - protein, 10 aa, synthetic construct
REKKKFLKRR

SEQ ID NO: 206 - protein, 20 aa, synthetic construct
KRKGDEVDGVDEVAKKKSKK

SEQ ID NO: 207 - protein, 17 aa, synthetic construct
RKCLQAGMNLEARKTKK

SEQ ID NO: 208 - DNA, 3700 bp, synthetic construct
  source 1..3700: mol_type = other DNA
gaaataattttgtttaactttaagaaggagatatacatatggctagcgcatggagtcatcctcaattcgagaaaggtggaggttctggcggtggatcgggaggttcagcgtggagccacccgcagttcgaaaaaggtggaggttctcttgaagtcctctttcagggacccatgtcccagatcactattcaatgccgacttgtggccaaggaacctattcgtcatacgctttggcaactgatggccgaccttaacactcccttcataaatgagttgttacagaaagtagcacaacacccagatttcgagaagtggaaacaacgtgggcgcctcaaggtaaaggtaattgaacagttgggaaacgagctgaagaaggatcctagattcttaggtcaacctgcccgtttctacacatcgggcatcaacttggtcaagtacatcttcaagtcctggctgaaattacaacaacgtcttcagcagaagctcgaccgaaagcggcgctggttggaagtcctcaagtcagacgaccagctcatcaaggacggacagactgacctggagactatacgccaaaaggccacggagatcctgcaaagttatgagggaactgaacagcttttcaacacactgttccaagcatacaactccgaggaagacatcctgacgcggacagcacttaactatctgttaaagaacagatgcaaattgcctcaaaagcccgaagatgctaagaagttcgccaagcgccgcagacaagtcgagatcgccataaagagattgcaggagcaaataaaggctagattaccgcaggggcgtgacgtgacaaacgagaactggctggagacgctgaacctcgcatgctacactgatcctgaaaacatcgaagaagctcgttcgtggcaggacaagttattaaccaaaagcagttcaatcccattccctataaattacgagacgaatgaggatctgatatggagcaagaatgagaagggtcacttgtgtgtacagtttaatgggatctcagacctgaagtttaagatatattgtgacaaaagacagctcaagtggtttcaacgcttctacgaagaccaacaaattaagaagagcaataataaccagcatagttcggctctgttcacgctgcgctccggacggatactgtggcaggaagataagggcaagggacagctctgggatatacatagactgacattacaatgtacgcttgacacacggacatggacacaagagggaacggagcaggtaaaagaagaaaaggccgacgaaattgccggtatacttacgcggatgaacgagaagggcgacctgacgaagaaccaacaagccttcatacaaagaaagcagtctactctggacaagttggaaaatccattccctcgcccttcgcgaccggtataccgtggtcagagcaacatcttacttggtgtttcgatggaattgaagaaacccgcaactattgcggttatcgatggtatgacccgtaaagtgctgacatatcgtaacataaagcagttattgggtaagaattaccctctcttgaatcgccaacgtcggcagaaacaactgcaaagccaccagcgcaatgtggcccaacgaaaagaggctttcaaccaattcggagacagcgaactgggagagtatatagaccgtctgttagccaaagcgatcatagcaatcgccaaacaatatcaagctcgttctattgtggtgccccacctgaaagacattagagaggccatccaaagcgaaatacaggcactggctgaggccaagatacctaactgtattgaggcacaagccgaatacgccaagaagtaccgtattcaagttcatcaatggtcctacggtcgcctgatcgacaacatccaagcccaagcaagcaagctcggtattgttatcgaagagtcacaacagccgcttcagggtaccccgctccaaaaggctgcagagctggcgttcaaggcttatcaaagtcggctttctgggagcggttcccccaagaagaaacgcaaggtagacggttctcctaagaagaaacgcaaggttgacagcggatgaatgaccattcaagaagcacaagcggttgccaaacagttaggggatattcaattaacctcagagaagttacaggcagaaattcagcgattaaaccgaaaaaccgttgttaccctttcccatgtagaagcattgcataattggttagaaggaaagcgtcaggctaaacaatcttgtcgggtggtgggggagtcacgcaccggaaaaaccattgcttgtaatgcttatcgtttgagacataaacccattcaaacccctggcaaaccgcctatcgttccagtggtgtatattcaagtaactcaagaatgtggggctaaagatttatttggggcaattattgagcatttaaagtatcaaatgaccaaaggaactgttgcagaaatccgtcaacgcacctttaaagtgttgcaacggtgtggcgtagaaatgctgattattgatgaagcggataggttgaaaccgaagacgtttgcagaagttagagatatttttgataagttaaatattgcagtggtattagtgggaacggatcgcttagatgcggtgattaagcgagatgagcaagtttataaccgttttcgggcttgtcatcgctttggtaagttagcaggggatgagtttagtcaaacggtgaatatttgggaacgtcaagtgttgaagttgcctgtagcgtctaatttaagcagtaagcgaatgttaaagattttgggacaagctacggggggttatcttggcttattggatatgattttacgagaatctgctattagagcgttgaaaaaagggttacagaagattgatttagacactttgaaggaagtcacggaggagtaccgataatggaaagtcgagagattcaaccttggtggttcctcgttgagcccttggctggtgagtctatttctcacttcttgggtcgattcagacgcgagaacgaacttaccgttaccatgatgggtaagattaccggactgggtggaacgatcacacgttgggaaaagtttcgattcataccgatcccaacggaagaagaacttacggcactgtcagaagtagttcaagttgaggttgagcgcctgtggcagatgttcccacccaagggtgtaggtatgaaacaccagcctatccgactgtgtggagcgtgctacgaagaggagcgctgccacaaaatagagtggcaactgaaaactacccaattctgttcccaacacggcctcactttactgagcgaatgcccgaactgcggcgctcgcttccaattcccagcactgtgggtaaacggctggtgccacagatgcttcttgacgttcggagaaatggtagagggacaaagtaacaagaaaaaatatttatgaatgtcacttagcacagaggcgactgctaaaatcgttagcgaattcggacgagatgctaatgacactggttccacagaggttcaagttgcacttttgacagcccagatcaatcatctgcaaggtcactttgcggagcacaagaaggaccaccacagtcggcgcgggctgctgcgcatggtttctcaacgccgcaagctgctggactacctcaagcgtaaggacgtcgcgcgttacactcaattgatcgagcggcttggattgcgacgttaa

SEQ ID NO: 209 - protein, 89 aa, unidentified
  source 1..89: note = MG190-178 ribosomal protein S15
MALTQQRKQEIISGFQVHETDTGSADVQIAMLTDRINRLSKHLQANKKDYSSRRGLLKMIGQRKRLLAYVQENSREKYQQLISRLGIRG

SEQ ID NO: 210 - protein, 89 aa, unidentified
  source 1..89: note = MG190-179 ribosomal protein S15
MSLTASEKQELMSSYQVHETDTGSPDLQVALLTKRISQLTGHLQKNPKDHASRRGLLKMIGRRRRLLAYINSKDTNRYKALIKSLGIRR

SEQ ID NO: 211 - protein, 89 aa, unidentified
  source 1..89: note = MG190-180 ribosomal protein S15
MALIQERKQELISEYQVHETDTGSAEVQVAMLTERINKLSQHLRENKKDYSSRRGLLKMIGRRKRLLSYISKKDVERYRELIGRLGIRR

SEQ ID NO: 212 - protein, 89 aa, unidentified
  source 1..89: note = MG190-181 ribosomal protein S15
MSITQERKQELISEYQVHGTDTGSSDVQVAILSDRINSLTQHLKVNKKDHASRLGLLKLIGRRRRLLTYIQQHDYEHYQQLIRRLGIRR

SEQ ID NO: 213 - protein, 89 aa, unidentified
  source 1..89: note = MG190-182 ribosomal protein S15
MSLTANEKQSLISEYQVHETDTGSADLQVAILTKRITQLTDHLKQNPKDHASRRGLLKMIGRRRRLLAYINGKDTNRYQALIKRLGIRR

SEQ ID NO: 214 - protein, 89 aa, unidentified
  source 1..89: note = MG190-183 ribosomal protein S15
MALLQERKQELISEYQVHETDTGSAEVQVAMLTERINKLSQHLQGNKKDYSSRRGLLKMIGRRKRLLSYIAKKDVNQYRALIGRLGIRR

SEQ ID NO: 215 - protein, 89 aa, unidentified
  source 1..89: note = MG190-184 ribosomal protein S15
MTLLQERKQELISEYQIHETDTGSVDLQIAMLTERINRLSAHLQKNKKDYSSRRGLLKMIGQRKRLMAYLLKQDTERYRNLIQKLGIRG

SEQ ID NO: 216 - protein, 89 aa, unidentified
  source 1..89: note = MG190-185 ribosomal protein S15
MALLQERKQELISEYQVHETYTGSAEVHVAMLTERINKLSQHLQSNKKDYSSRRGLLKMIGRRKRLLSYIAKKDVNQYRELIGRLGIRR

SEQ ID NO: 217 - protein, 89 aa, unidentified
  source 1..89: note = MG190-186 ribosomal protein S15
MTLLQERKQEIMSEYQIHETDTGSVDLQIAMLTERINRLSAHLQKNKKDYSSRRGLLKMIGQRKRLMAYLLKQDTDRYRDLIKKLGIRG

SEQ ID NO: 218 - protein, 89 aa, unidentified
  source 1..89: note = MG190-187 ribosomal protein S15
MALLQERKQELISEYQVHETDTGSAEVQVAMLTERINKLSQHLQSNKKDYSSRRGLLKMIGRRKRLLSYIAKKDVNQYRELIGRLGIRR

SEQ ID NO: 219 - protein, 89 aa, unidentified
  source 1..89: note = MG190-188 ribosomal protein S15
MALTQEDKQQIMAEHQAHETDTGSSDVQVAMLTERINRLSAHLKANKKDHSSRRGLLQMIGRRKRLLAYIYKQDQQRYRALITRLGIRG

SEQ ID NO: 220 - protein, 614 aa, unidentified
  source 1..614: note = MG64-128 effector
MSQKTIRCRLIASQKSRKAIWKLMAERNTPLVNEVLRQLPEHPDFAKWQQKGNLPDVAVKRIIDALKSDPHFSDQPFWYYTSAQKQVTYTFKSWLSIQRRKQWRLQGKRWWLEILLPDAELAKLVKCSVEKLRTEAAKILAKVGDVDPFKHLLEQYRHEQKLLRKCAIAFLLKRNTEIDREEDLEQLKQRSRRVELQIRRLEIQLQASLPKGRDLTGERQAAALAQSVLASPDDDESYELWRNTVTREPAQFPFPVICETSEWLKWQRDHNGRISVGFSALSEHVFKIYCDKPHQHWFDRFFEDQETKRTGGKQHSAGLFTLRSAKLTWVPSNKHANASEPWNCYYLNLSCTVDTRLWTQEGTQIVIQEKAAEKAGKLESMRRKENLSKTQQGYIKRLEATLEKLQTPYPRPSRPLYSGKTNILVGVSMGLDKPATVAVVDALAGEVLTYRSVKQLLGNDYRLLKRAQTEKTRIHKNHRRGGRRVSEESNIAQQVDRLLAKSIIDIAREYEASSIVVPDLANIREIVETEVKARAQDKVPDFVEGQKQYAKAYRTQVHQWSYRRLQEAVRTKAEQSGITIEVVRQGLSGTQHEKAKALALQGYEKRIREHVEMA

SEQ ID NO: 221 - RNA, 37 nt, synthetic construct
  source 1..37: mol_type = other RNA
gacgcaatgagcttttaaggctcatgaggattgaaac

SEQ ID NO: 222 - RNA, 265 nt, synthetic construct
  source 1..265: mol_type = other RNA
gtatatttgtacaaaagcgccgcagatcatgcgcaagcctctgttctgtgaaaaatgagggtttgtttgactgtgtgatagcggtcttactttctgaccctggtagctgaccactccgatgctgctgttgaaagtgaacttgttaggacttgggcaccataaaacaggagaggggcgcacccagcaagagagaacggacttactgtagtgttggctgccgaatcaactccgatcaaggagtaatccatgcacccatacccatata

SEQ ID NO: 223 - DNA, 3140 bp, synthetic construct
  source 1..3140: mol_type = other DNA; note = LE-mNeon-RE
tgtacattaacagattatttgtcatcggtaacaaattgttgtcatcttaacaaaatatttgtcatcaataacatattatgtgtcgtgtgcttattactgaaactaatcctagacgatggtaaaaaatcgatggatagcgattttattatctaactgctgatcgagtgtagccagatctagtaatcaattacggggtcattagttcatagcccatatatggagttccgcgttacataacttacggtaaatggcccgcctggctgaccgcccaacgacccccgcccattgacgtcaataatgacgtatgttcccatagtaacgccaatagggactttccattgacgtcaatgggtggagtatttacggtaaactgcccacttggcagtacatcaagtgtatcatatgccaagtacgccccctattgacgtcaatgacggtaaatggcccgcctggcattatgcccagtacatgaccttatgggactttcctacttggcagtacatctacgtattagtcatcgctattaccatgctgatgcggttttggcagtacatcaatgggcgtggatagcggtttgactcacggggatttccaagtctccaccccattgacgtcaatgggagtttgttttggcaccaaaatcaacgggactttccaaaatgtcgtaacaactccgccccattgacgcaaatgggcggtaggcgtgtacggtgggaggtctatataagcagagctggtttagtgaaccgtcagatcgcctggagacgccatccacgctgttttgacctccatagaagacaccgggaccgatccagcctcccctcgaagcttacatgtggtaccgagctcggatcctgagaacttcagggtgagtctatgggacccttgatgttttctttccccttcttttctatggttaagttcatgtcataggaaggggagaagtaacagggtacacatattgaccaaatcagggtaattttgcatttgtaattttaaaaaatgctttcttcttttaatatacttttttgtttatcttatttctaatactttccctaatctctttctttcagggcaataatgatacaatgtatcatgcctctttgcaccattctaaagaataacagtgataatttctgggttaaggcaatagcaatatttctgcatataaatatttctgcatataaattgtaactgatgtaagaggtttcatattgctaatagcagctacaatccagctaccattctgcttttattttatggttgggataaggctggattattctgagtccaagctaggcccttttgctaatcatgttcatacctcttatcttcctcccacagctcctgggcaacgtgctggtctgtgtgctggcccatcactttggcaaaggcggccgcatggtttctaagggtgaagaggacaatatggctagcctgcctgcaacccacgaactgcatatatttgggtccataaatggcgttgatttcgacatggttgggcaaggaaccggcaacccaaacgacggatatgaggaactgaatctgaaatcaaccaaaggggatctgcaattttctccatggatcctggtcccccatattggctatgggtttcatcaatatctgccatatccggacggcatgagcccctttcaagccgccatggtcgatggatctggctatcaggttcatcgcacaatgcaatttgaagacggggccagtctgaccgtcaactatcggtatacctacgaaggctctcatattaaaggggaagcgcaggtaaaaggcactggattccccgcggacggacccgtcatgactaattctctgactgccgctgattggtgtcggagcaagaaaacttacccgaatgataaaacaatcatcagcacatttaagtggagttacacgactggcaacggcaagagataccggagcactgcacgtaccacgtatacttttgcgaagcccatggcagcaaactatctgaagaaccaaccaatgtatgtctttcggaaaacagagctcaagcattccaaaaccgagcttaattttaaggaatggcaaaaggcctttaccgatgttatgggaatggacgaactgtacaagtctagaagttgtctcctcctgcactgactgactgatacaatcgatttctggatccgcaggcctaatcaacctctggattacaaaatttgtgaaagattgactggtattcttaactatgttgctccttttacgctatgtggatacgctgctttaatgcctttgtatcatgctattgcttcccgtatggctttcattttctcctccttgtataaatcctggttgctgtctctttatgaggagttgtggcccgttgtcaggcaacgtggcgtggtgtgcactgtgtttgctgacgcaacccccactggttggggcattgccaccacctgtcagctcctttccgggactttcgctttccccctccctattgccacggcggaactcatcgccgcctgccttgcccgctgctggacaggggctcggctgttgggcactgacaattccgtggtgttgtcggggaagctgacgtcctttccatggctgctcgcctgtgttgccacctggattctgcgcgggacgtccttctgctacgtcccttcggccctcaatccagcggaccttccttcccgcggcctgctgccggctctgcggcctcttccgcgtcttcgccttcgccctcagacgagtcggatctccctttgggccgcctccccgcctgtctagcttgactgactgagatacagcgtaccttcagctcacagacatgataagatacattgatgagttaatgaacaaaaatgtctgattattacataattgtttatttaatataattgtatcgtaatacttgaagtttggagacaagtaatttgttaatactgctccagtccctaaaaaagtgccattcgggtaaatgacacttaatctgttaatttactggaaaatgacagttaatttgttaatatagtaagcaataacttttgtcaaagattaatgctataattcagctaaagcagtgattatataaagctttcactctcaaatagttcggcgacacgattttgttaagacgacaaataattagttactgtaca

SEQ ID NO: 224 - DNA, 38 bp, synthetic construct
  source 1..38: mol_type = other DNA; note = Line1 3' Fwd
gctcttccgatctnnnnnaatgctcatcatcactggcc

SEQ ID NO: 225 - DNA, 38 bp, synthetic construct
  source 1..38: mol_type = other DNA; note = Line1 3' Rev
gctcttccgatctnnnnntgctattgtgaatagtgccg

SEQ ID NO: 226 - DNA, 39 bp, synthetic construct
  source 1..39: mol_type = other DNA; note = primer CMV rev
gctcttccgatctnnnnntgggctatgaactaatgaccc

SEQ ID NO: 227 - DNA, 182 bp, Simian Virus 40
  source 1..182: mol_type = other DNA
cctaactccgcccatcccgcccctaactccgcccagttccgcccattctccgccccatcgctgactaattttttttatttatgcagaggccgaggccgcctcggcctctgagctattccagaagtagtgaggaggcttttttggaggcctaggcttttgcaaaggaggtagccaacatgatt

SEQ ID NO: 228 - protein, 424 aa, Escherichia coli
  source 1..424: note = EcClpX
MTDKRKDGSGKLLYCSFCGKSQHEVRKLIAGPSVYICDECVDLCNDIIREEIKEVAPHRERSALPTPHEIRNHLDDYVIGQEQAKKVLAVAVYNHYKRLRNGDTSNGVELGKSNILLIGPTGSGKTLLAETLARLLDVPFTMADATTLTEAGYVGEDVENIIQKLLQKCDYDVQKAQRGIVYIDEIDKISRKSDNPSITRDVSGEGVQQALLKLIEGTVAAVPPQGGRKHPQQEFLQVDTSKILFICGGAFAGLDKVISHRVETGSGIGFGATVKAKSDKASEGELLAQVEPEDLIKFGLIPEFIGRLPVVATLNELSEEALIQILKEPKNALTKQYQALFNLEGVDLEFRDEALDAIAKKAMARKTGARGLRSIVEAALLDTMYDLPSMEDVEKVVIDESVIDGQSKPLLIYGKPEAQQASGE

SEQ ID NO: 229 - protein, 466 aa, synthetic construct
  source 1..466: note = EcClpX-NLS
MTDKRKDGSGKLLYCSFCGKSQHEVRKLIAGPSVYICDECVDLCNDIIREEIKEVAPHRERSALPTPHEIRNHLDDYVIGQEQAKKVLAVAVYNHYKRLRNGDTSNGVELGKSNILLIGPTGSGKTLLAETLARLLDVPFTMADATTLTEAGYVGEDVENIIQKLLQKCDYDVQKAQRGIVYIDEIDKISRKSDNPSITRDVSGEGVQQALLKLIEGTVAAVPPQGGRKHPQQEFLQVDTSKILFICGGAFAGLDKVISHRVETGSGIGFGATVKAKSDKASEGELLAQVEPEDLIKFGLIPEFIGRLPVVATLNELSEEALIQILKEPKNALTKQYQALFNLEGVDLEFRDEALDAIAKKAMARKTGARGLRSIVEAALLDTMYDLPSMEDVEKVVIDESVIDGQSKPLLIYGKPEAQQASGEGGGGSGGGGSDYKDDDDKGSGSPKKKRKVDGSPKKKRKVDSG

SEQ ID NO: 230 - protein, 465 aa, synthetic construct
  source 1..465: note = NLS-EcClpX
MKRPAATKKAGQAKKKKGGGGSDYKDDDDKGGGGSGGGGSNATDKRKDGSGKLLYCSFCGKSQHEVRKLIAGPSVYICDECVDLCNDIIREEIKEVAPHRERSALPTPHEIRNHLDDYVIGQEQAKKVLAVAVYNHYKRLRNGDTSNGVELGKSNILLIGPTGSGKTLLAETLARLLDVPFTMADATTLTEAGYVGEDVENIIQKLLQKCDYDVQKAQRGIVYIDEIDKISRKSDNPSITRDVSGEGVQQALLKLIEGTVAAVPPQGGRKHPQQEFLQVDTSKILFICGGAFAGLDKVISHRVETGSGIGFGATVKAKSDKASEGELLAQVEPEDLIKFGLIPEFIGRLPVVATLNELSEEALIQILKEPKNALTKQYQALFNLEGVDLEFRDEALDAIAKKAMARKTGARGLRSIVEAALLDTMYDLPSMEDVEKVVIDESVIDGQSKPLLIYGKPEAQQASGE

SEQ ID NO: 231 - DNA, 20 bp, synthetic construct
  source 1..20: mol_type = other DNA; note = AAVS1 geno fwd
gagctgggaccaccttatat

SEQ ID NO: 232 - DNA, 19 bp, synthetic construct
  source 1..19: mol_type = other DNA; note = AAVS1 geno rev
agaggttctggcaaggaga

SEQ ID NO: 233 - DNA, 24 bp, synthetic construct
  source 1..24: mol_type = other DNA; note = AAVS1 target 5
acagaaaagccccatccttaggcc

SEQ ID NO: 234 - DNA, 24 bp, synthetic construct
  source 1..24: mol_type = other DNA; note = AAVS1 target 6
tcctgatattgggtctaaccccca

SEQ ID NO: 235 - protein, 431 aa, unidentified
  source 1..431: note = ACC1-1 accessory protein
MARIGDGGDLLKCSFCGKSQKQVKKLIAGPGVYICDECIDLCNEIIEEELAENTGEGGLDQLPKPREIYDFLNAYVIGQDAAKKALAVAVYNHYKRVQAGLAGGKHAAKDETVELAKSNILVIGPTGCGKTYLAQTLARMLNVPFAIADATALTEAGYVGEDVENILLKLIQAADYDVKKAETGIIYIDEVDKIARKADNPSITRDVSGEGVQQALLKILEGTTASVPPQGGRKHPHQEFLTIDTTNVLFVCGGAFANLDKVIERRIGSNGIGFGASMQTRREKDTGDTFERVLPEDLVNYGLIPEFIGRLPVVSAVHQLSRDDLITILTEPRNALVKQFQRFFQFDGIELVFSDDALISVADKALARETGARGLRSIIEEVLLEVQFELPSRRDVKKCVVTKETIERGLAPTLVTEAAPDEEQARQAESA

SEQ ID NO: 236 - protein, 432 aa, unidentified
  source 1..432: note = ACC1-10 accessory protein
MARPGASAQCSFCGKSAREVRKLIAGPGVSICDNCVLLCKNVLDAEQAAQLRSERTLTVPKPHVIKREMDRYCVGQEQAKKTLAVAVHNHYKRILSRRSAAPADKPVQEDPHAEVELEKSNILLIGPTGSGKTLLARTLARILDVPFAIADATTVTEAGYVGEDVENIVLRLLQNADYDVARAQRGIIYIDEIDKIARKSENPSITRDVSGEGVQQALLKMLEGTIANVPPQGGRKHPYQDCIQIDTSNILFICGGAFVGLEKVIEQRIGKKSMGFIKPGEQLAVTREQRLADALKALEPEDLIKYGMIPEFIGRLPVVATLDPLDEKALEAILTQPKNAILKQAQKLLRMDGVELEFEPAAISAIAKEAYRRKTGARALRAIVEELMLDVMYEVPSRRDIKYVRITAEMVERRSTHELIPHPSTLPKPESA

SEQ ID NO: 237 - protein, 446 aa, unidentified
  source 1..446: note = ACC1-11 accessory protein
MRGSMSKYDSHLKCSFCGKSQEQVRKLIAGPGVYICDECVELCNEILDDELVDASARAPQPVPPVDEPQPKRRSAQRMTFQQLPKPREIKRHLDDYAIGQDEAKKVLSVAVYNHYKRLSLLQEGATSDDPVQLQKSNILLIGPTGCGKTLLAQTLADILDVPFAVADATTLTEAGYVGEDVENILLRLLQVADLDVEQAQRGIIYIDEIDKVARKSENPSITRDVSGEGVQQALLKMLEGTVANVPPQGGRKHPYQDCIQIDTTNILFICGGAFVGLDKVVERRVGKKTIGFVRPGETPSKEQRVADVLRYLEPDDFVKFGMIPEFVGRLPVAAVLEPLDVETLVAILTQPRNAIVKQYQKLLGMDSIELEFAPDAVRAIAQEAYRRKTGARALRGIIEELMLDVMYDLPSRKDVRRCRVTRNMVEQRSTAELLVHPSSLPKPESA

SEQ ID NO: 238 - protein, 427 aa, unidentified
  source 1..427: note = ACC1-12 accessory protein
MSKKESGGKKGRLLFCSFCGRSEAEVKKLVSGPDAYICDECVHMCDEIIKEGLASAAAIGGATSAKDGVDDAPVLPTPKEIDKNLQNYVIGQEQARKTLAVAVYNHYKRIYQGKDNTDVELSKSNILLIGPTGSGKTLLAQTLARTLKVPFAIADATTLTEAGYVGEDVENVIQKLLQNAEHDKAKAERGIIYIDEIDKITRKSENPSITRDVSGEGVQQALLKLVEGTVASVPPKGGRKHPHQELEHIDTSNILFICGGAFEGLDKIIRHRTEKTGIGFEADIQSTKDRHSVQALLKKVEPEDLIKFGLIPEFVGRMPILATLDELDKPALIRILKEPKNALVKQYQRLFDMEEVDLEFTEDAISLIAEKAYERKTGARGLRSILEQILLDTMFHLPGDTEVTRVLVDEDVVKGTKQPIQLKLKAA

SEQ ID NO: 239 - protein, 425 aa, unidentified
  source 1..425: note = ACC1-13 accessory protein
MTKATTGDGKSTLYCSFCGKSQHEVRKLIAGPTVFICDECVELCMDIIREENKTSLVKSNEGVPSPQEIFQVLQDYVIGQAKAKRVLSVAVHNHYKRLNHAGQNGDVELSKSNILLIGPTGCGKTLLAQTLAEMMEVPFAVADATTLTEAGYVGEDVENILLRLLQKADGDVEQAQRGIIYIDEIDKIARKSENPSITRDVSGEGVQQALLKMLEGTVANVPPQGGRKHPYQDCIQIDTSQILFICGGAFVGLDDVIQRRMGRNAIGFVPGETRNGRNRQKDQEASQVLRNLEPDDLVKYGLIPEFIGRIPVSAVLEPLDEQALEAILTEPRDALVKQFQTLLSMDSVRLEFQPEAVRAIAREAHRRKTGARALRGIIEDLMLDLMYDLPSQNEVEKFVITEKLVEECHGNKVVPHPSTLEQQSA

SEQ ID NO: 240 - protein, 413 aa, unidentified
  source 1..413: note = ACC1-14 accessory protein
MTEDTPRCSFCGRDKNESLILIAGVDGHICEVCVEQAYDLVDSELNVRKDSKRVDSSVNMPDGLTPKGIKKHLDEYVIGQEEAKKYLSVAVYNHYKRLNQRSISPDVEIEKSNIVLVGQTGTGKTLLAKTIAQMLQVPFAIVDATVFTEAGYVGEDVESMLTRLLQACDYDVARAENGIVYIDEIDKIARKGDNPSITRDVSGEGVQQALLKILEGSDVNVPPQGGRKHPEQKLVKVNTQNILFICGGAFDGIEKIVARRLNTQVIGFNHDEKQMIDADNLLQYITHRDLKAFGMIPELIGRLPVLTYLSPLSKESLKRILLEPKNALIKQYEKLFAIEDIKLQIEDDVIEYIAEKAIEYDLGARGLRSICEAIMTDAMYELPSEEKVKEFVLDLEYAKKHVTKSNLKKLRVA

SEQ ID NO: 241 - protein, 451 aa, unidentified
  source 1..451: note = ACC1-15 accessory protein
MANFDSHLKCSFCGKSQEQVKKLIAGPGVYICDECVDLCNEILDEELMPSSKGQNNSSAGQSNNNSNSSSKNSEGFQPIFLEKLPKPKQIKEQLDQFVIGQNEAKKVLSVAVYNHYKRLAVSQEKQLSGDENSEDGIELQKSNILLIGPTGSGKTLLAQTLAKILDVPFAIADATTLTEAGYVGEDVENILLRLLQVADLDLDEAQRGIIYIDEIDKIARKSENPSITRDVSGEGVQQALLKMLEGTVANVPPQGGRKHPYQDCITIDTSNILFICGGAFVGIDKIIAKHQDQKILGFEIPADVSNEELIATAARQLEPDDLVRFGLIPEFTGRLPVVAVLDPLNEEALVQILTEPKNALVKQYQKLLGMDNVELEFSDEAIKAISKEAYRRKTGARALRGLVEEIMLDIMYELPSREDVQHCVVTKEMVEKRSTSELLVHPSSIPEKESA

SEQ ID NO: 242 - protein, 433 aa, unidentified
  source 1..433: note = ACC1-2 accessory protein
MAKHDDSRLKCSFCGKSQDQVKKLIAGPEVYICDECVDLCNEILDEEFFEAEDGEKAAATVEMTKVPKPAEIKAFLDEHIVGQDDAKKVLSVAVYNHYKRINHNANPEADKATAVEIQKSNILLVGPSGCGKTLLAQTLAKMLEVPFAVADATTLTEAGYVGDDVENILLRLYQAADYDAAKAEQGIIYIDEIDKIARKSENPSITRDVSGEGVQQALLKMIEGTIANVPPQGGRKHPHQEFIQINTGNILFVCGGAFVGLEKIVESRASAGKSMGFGASAPKHLHDREIAAAKMLKQLQPEDLLKFGLIPEFIGRIPVVAVLDPLDEDALMKILTAPKNAIFKQYQELLSMDGVELEFAPDAAQAISKEALKRRTGARALKSIVEELMLDLMYEVPSRNDIQKVIVTGDMVEKRSTAEVILLPDKQPKGEIA

SEQ ID NO: 243 - protein, 420 aa, unidentified
  source 1..420: note = ACC1-3 accessory protein
MSEFEYKCSFCGKSQHEAKKLIASPNGDAYICDECVDICKDIIIDVVKKSDLEKIELPTPSEIKAKLDEYIVGQDEAKKVLSVAVYNHYKRLNYNLDKDAKKKSEEVELEKSNILMVGPTGSGKTLLAKTLAKVLKVPFATADATTLTEAGYVGDDVENILLKLIQNADYDIEKAQRGIIYIDEIDKIAKKTQNVSITRDVAGEGVQQALLKILESTIASVPPQGGRKHPHQEMLQIDTTNILFICGGAFVGLDKIIEGRKNDTSLGFNANIKNVENESLAKYYKDLQPNDLIKFGLIPEFIGRLPVVVGLDDLDEKALVKILKEPKNSLIKQYDLMFKMDNINIEFTEDAILAIAKKAMELKTGARGLRSIIEQKMTKIMFEAPSLKNVEKIVVTSQFIELENAQPEIIKKDDDKKEVC

SEQ ID NO: 244 - protein, 411 aa, unidentified
  source 1..411: note = ACC1-4 accessory protein
MAKMKCTCCNKAQDEVKKLVIGPAANICNECIALCSDILAEETAAPESKPLKGRNLPKPIEIKAILDDYVIGQDEAKKALSVSVYNHYKRLLKNTVGADVEISKSNVMLLGPTGVGKTLLAQTLARVLNVPFAMVDATTLTEAGYVGEAVENIVLKLLQNANYEVEPTERGIVYIDEIDKISRKSENASITRDVSGEGVQQALLKLLEGTVANIPPKGGRKHPHQEYIKVNTSNILFICGGAFVGLEDIISRRVGKKTMGFGSEHFAHGSKRREDLLKLVQPEDLIKYGLIPEFIGRLPVVTTLQDLDEDALVRILTEPKNALSKQFETLFQMDRVKLKLTTEAVRAIAKEARKRNTGARGLRAIMEETLVDLMYELPSRNDVRECVITAEVVSRKEKPILVLDDEAAQSA

SEQ ID NO: 245 - protein, 479 aa, unidentified
  source 1..479: note = ACC1-5 accessory protein
MAKDQTPDTMDFGPIHCSFCGKTQEQVRKLVKGPSNIFICDECVAACSEILEESLTQDFLSQQQMPFPSDMMLPQQLSQFMAEPEDEEDGFEDAAHVASDLITRVPTPHEIYDRLSAYVMGQEDAKRAMSVAVYNHYRRVLEREAAGDAPASDASEGPLGQHAAGSDLDDVELAKSNILLLGPTGTGKTLLAQTLARILEVPFAIADATALTEAGYVGEDVENILLKLITAADGDVERAQIGIVYVDEIDKIARKAENLSITRDVSGEGVQQALLKILEGTVASVPPTGGRKHPQQELIQIDTTNILFICGGAFVGLDKIVSDRVGNKGIGFNSEIAGPSSEDETDLLHQVLPEDLNAFGMIPEFIGRTPVITQTCPLAEEDLVSILTEPKNAIVRQYRRMFELEGCELEFTDEALHEIAKLALARKTGARGLRSICEDLLQQTMFDLPSEENVAKVVVTAECVTGSEQPRRIYDVDVD

SEQ ID NO: 246 - protein, 449 aa, unidentified
  source 1..449: note = ACC1-6 accessory protein
MSKYDSHLKCSFCGKSQEQVRKLIAGPGVYICDECVELCNEILEEELMPSNRSQPSHSAVKSNPRPSKKTSSTRKPLSLSKLPKPKEIKELLDQYVIGQDEAKKVLSVAVYNHYKRLTVAESEQKTGKSKEETIELQKSNILLIGPTGSGKTLLAQTLANILDVPFAIADATTLTEAGYVGEDVENILLRLLQVSNLDLDEAQRGIIYIDEIDKIARKSENPSITRDVSGEGVQQALLKMLEGTVANVPPQGGRKHPYQDCITIDTSNILFICGGAFVGLDKIVEQDQEKKILGFQIPAENTTKEERVSKAARQLQPDDLVRFGLIPEFAGRLPVVAVLDPLNEEALMEILTRPRNALVKQYQKLVGMDNVILEFEPEAIRAIAQEAYRRKTGARALRGIVEEIMLDVMYEIPSRQDVQHCVITKEMVEKRSTAELILHPSSLPEPESA

SEQ ID NO: 247 - protein, 434 aa, unidentified
  source 1..434: note = ACC1-7 accessory protein
MANKKKTKNPLDCLDDGNMDDMCAFCGATSEDGVRIIHGPVFNICESCVGKCADMLGYSLVKADAGEGKAADGVPEFVKKLKVPVPRDIKKFLDSYIVGQEKAKKALSVAVHNHYRRITGGSKNPDYADVEVEKSNILLIGPTGSGKTLFARTLARMLDVPFAIADATTLTEAGYVGDDVENILLSLIQAADGDIKRAERGIIYIDEIDKIARMTENVSITRDVSGEGVQQALLKILEGTVASVPPHGGRKHPQQECIKINTQNILFICGGAFVGIDSFVKQRAGKNEIGFEGKTTEAKKAEKLRIEPEDLVRYGLIPEFTGRIPVICELNEITEEDMVRILTEPKNCLVKQYQKLFDMDGVKVTFADDALREMAREAIRRKAGARGLRAVMEQLMTELMFEAPGHKNIAEITITGELVKEQLRDPTTLLKFLK

SEQ ID NO: 248 - protein, 423 aa, unidentified
  source 1..423: note = ACC1-8 accessory protein
MRRFSSSNYCFFCGGSAETGSKLIKGPSGQFICTDCIKACQNLLENDSGELEPVELSKVPTPKEFKAYLDQYVVGQDDAKKVLSVAVYNHYKRMFSQSKETEDSGIKIEKSNVLLIGPTGSGKTLLAKTLAQRLKVPFAIADATTLTEAGYVGEDVENVLLKLINAADGDIEAAQRGIIFIDEIDKISRKSENMSITRDVSGEGVQQALLKIIEGTVASVPPQGGRKHPNQEMLQIDTTNILFVMGGAFVGLDKIIEQRVSAHSMGFGSNVAMDEEEKMNLLNQVSPDDLVKFGLIPELIGRMPITVALKELTKDDLVSILTEPKNAITKQFKASFDIDNVELNFDEDAIAEIAEEAIRQKTGARGLRTIVEKMLMDVMFEIPDLQGRNSFTVTKELVQQKVEDIKSLIKQIADTETPAIEEK

SEQ ID NO: 249 - protein, 420 aa, unidentified
  source 1..420: note = ACC1-9 accessory protein
MSMKSRKGTPQVIKCSFCGRGQDEVAKLVSGPSVYICNECIKLCNDILEDELPAVNALETKDFPKPADIKKLLDAYVVGQEIAKKTLSVAVYNHYKRINHRRDADDVELDKSNILLVGSTGTGKTLLAQTLARILKVPFAIVDATALTEAGYVGEDVENILVKLLQAADYNLAAAERGIVYIDEIDKISRKSDNPSITRDVSGEGVQQALLKLLEGTVANVPPQGGRKHPQQKYLEVDTKDILFICGGAFEGLDRVIKQRMGEKVLGFDRADRKPNRLDRGRILSKLDPGDLMKYGLIPELVGRLPVTCALEELDSDALMRILTEPKNALIRQYEKLFEMEGVELAFESDALVAIAQKAIDRKTGARGLRAILEELMLDLMYEIPSSKEILRVVVTRETVLEGVGPDIYTDGDQIYVKQA

SEQ ID NO: 250 - DNA, 38 bp, synthetic construct
  source 1..38: mol_type = other DNA; note = AAVS1 geno fwd
gctcttccgatctnnnnngagctgggaccaccttatat

SEQ ID NO: 251 - DNA, 39 bp, synthetic construct; identical to SEQ ID NO: 226
  source 1..39: mol_type = other DNA; note = primer CMV rev

SEQ ID NO: 252 - DNA, 95 bp, synthetic construct
  source 1..95: mol_type = other DNA; note = AAVS1 target 1 pdonor sequence
tgcgtgacctgcccggttctcagtggccaccctgcgctaccctctcccagaacctgagctgctctgacgcggccgtctggtgcgtttcactgatc

SEQ ID NO: 253 - DNA, 38 bp, synthetic construct
  source 1..38: mol_type = other DNA; note = AAVS1 target 1 NGS rev
gctcttccgatctnnnnnatcagtgaaacgcaccagac

SEQ ID NO: 254 - DNA, 418 bp, synthetic construct
  source 1..418: mol_type = other DNA; note = Transposed sequence
gagctgggaccaccttatattcccagggccggttaatgtggctctggttctgggtacttttatctgtcccctccaccccacagtggggccactagggacaggattggtgacagaaaagccccatccttaggcctcctccttcctagtctcctgatattgggtctaacccccatgtacattaacagattatttgtcatcggtaacaaattgttgtcatcttaacaaaatatttgtcatcaataacatattatgtgtcgtgtgcttattactgaaactaatcctagacgatggtaaaaaatcgatggatagcgattttattatctatgcgtgacctgcccggttctcagtggccaccctgcgctaccctctcccagaacctgagctgctctgacgcggccgtctggtgcgtttcactgat

SEQ ID NO: 255 - DNA, 418 bp, synthetic construct
  source 1..418: mol_type = other DNA; note = Untransposed sequence
gagctgggaccaccttatattcccagggccggttaatgtggctctggttctgggtacttttatctgtcccctccaccccacagtggggccactagggacaggattggtgacagaaaagccccatccttaggcctcctccttcctagtctcctgatattgggtctaacccccacctcctgttaggcagattccttatctggtgacacacccccatttcctggagccatctctctccttgccagaacctctaaggtttgcttacgatggagccagagaggatcctgggagggagagcttggcagggggtgggagggaagggggggatgcgtgacctgcccggttctcagtggccaccctgcgctaccctctcccagaacctgagctgctctgacgcggccgtctggtgcgtttcactgat

SEQ ID NO: 256 - DNA, 20 bp, synthetic construct
  source 1..20: mol_type = other DNA; note = LE boundary sequence
aaataatctgttaatgtaca

SEQ ID NO: 257 - protein, 67 aa, unidentified
  source 1..67: note = MG161-1 functional domain
VSVKFRVKGQEKEVDVSKIKKAWIVGKMVSFTYDDNGKTGRGAVSEKDAPKELLDMVQKNSKVATVQ

SEQ ID NO: 258 - protein, 60 aa, unidentified
  source 1..60: note = MG161-3 functional domain
VSIKFKYKGEEKEVEVSKIKKAWKVGRMISFLYEDNGKNARGAVSEKDAPQELVALVEKH

SEQ ID NO: 259 - protein, 60 aa, unidentified
  source 1..60: note = MG161-4 functional domain
VTVKFKYKGEEKEVDISKIKKAWKVGRMISFVYDDNGKNGRGAISEKEAPAELLKLVRSK

SEQ ID NO: 260 - protein, 62 aa, unidentified
  source 1..62: note = MG161-5 functional domain
AKVKFVYKGEEKEVDISKIKKVWRVGKMISFTYEDNGKLGRGAVSEKNAPKELLALLSQQKK

SEQ ID NO: 261 - protein, 59 aa, unidentified
  source 1..59: note = MG161-6 functional domain
PTIKFKYKGEEKEVELEKIKKAWTVGDKMVSFLYEEGGKVKRGGLSLREAPKELLALLE

SEQ ID NO: 262 - protein, 103 aa, unidentified
  source 1..103: note = MG161-7 functional domain
VAPPTVPLSPQSSWRGASLALLKEKKRYLNFLPRPWKGRGFQFIVSIKFKYKGEEKEVDISKIKKVWKVGNMVSFTYDDNGKTGRGALSLKEAPQELLQKLNH

SEQ ID NO: 263 - protein, 63 aa, unidentified
  source 1..63: note = MG161-21 functional domain
AKVKFRYKGEEKEVDISKIKKVWRVGKMISFTYDDNGKTGRGAVSEKDAPKELLDMLNKQAKK

SEQ ID NO: 264 - protein, 59 aa, unidentified
  source 1..59: note = MG161-23 functional domain
VKVKFVYKGEQKEVDVSKIKKVWRVGKMISFTYDDNGKTGRGAVSEKDAPKELLALVKK

SEQ ID NO: 265 - protein, 60 aa, unidentified
  source 1..60: note = MG161-24 functional domain
VTVKFKYKGEQKEVDISKIKKVWRVGKMISFTYDDNGKTGRGAVSEKEAPPELLKMLEKK

SEQ ID NO: 266 - protein, 63 aa, unidentified
  source 1..63: note = MG161-28 functional domain
VTVKFKYKGEEKQVDVSKVKKVWKVGKMISFTYDDNGKTGRGAISEKDAPKELIQMLEKSGKK

SEQ ID NO: 267 - protein, 63 aa, unidentified
  source 1..63: note = MG161-36 functional domain
VTVKFKYKGEQKEVDISKIKKVWRVGKMISFTYDDNGKTGRGAVSEKDAPKELLELLEKQQKK

SEQ ID NO: 268 - protein, 66 aa, unidentified
  source 1..66: note = MG161-40 functional domain
VTVKFKYKGEEKEVDISKIKKVWRVGKMISFTYDDNGKTGRGAVSEKDAPKELLDMLEKAEKEKGK

SEQ ID NO: 269 - protein, 59 aa, unidentified
  source 1..59: note = MG161-41 functional domain
VKVKFVYKGEEKEVDVSKIKKAWRVGKMISFTYDDNGKTGRGAVSEKDAPKELLALVKK

SEQ ID NO: 270 - protein, 63 aa, unidentified
  source 1..63: note = MG161-43 functional domain
VKVKFRYKGEEKEVDISKIKKVWRVGKMISFTYDDNGKTGRGAVSEKDAPKELLDLLNKQSKK

SEQ ID NO: 271 - protein, 64 aa, unidentified
  source 1..64: note = MG161-46 functional domain
TKVKFKYKEEEKEGDTSKIKNVWRVGKMISFTYDDNGKTGRGAVSEKDAPKELLDMLAKAEKGK

SEQ ID NO: 272 - protein, 64 aa, unidentified
  source 1..64: note = MG161-51 functional domain
VTVKFKYKGEEKEVDISKIKKVWRVGKMISFTYDEGGGKTGRGAVSEKDAPKELLEMLEKQSKK

SEQ ID NO: 273 - protein, 64 aa, unidentified
  source 1..64: note = MG161-53 functional domain
VTVRFKYKGEEKEVDVSKIKKVWRVGKMISFTYDDNGKTGRGAVSEKDAPKELLAMLEKQSKSK

SEQ ID NO: 274 - protein, 62 aa, unidentified
  source 1..62: note = MG161-57 functional domain
ATVKFKYKGEEKQVDISKIKKVWRVGKMISFTYDDNGKTGRGAVSEKNAPRELIDMVEKGKK

SEQ ID NO: 275 - protein, 64 aa, unidentified
  source 1..64: note = MG161-59 functional domain
AKVKFKYKGEEKEVDTSKIKKVWRVGKMVSFTYDDNGKTGRGAVSEKDAPKELLDMLAKAEKGK

SEQ ID NO: 276 - protein, 59 aa, unidentified
  source 1..59: note = MG161-62 functional domain
PTVKFKYKGETKEVDISKVKKVWKVGKMVSFTYDDNGKTARGAISEKDAPKELLNKMGK

SEQ ID NO: 277 - protein, 65 aa, unidentified
  source 1..65: note = MG161-63 functional domain
NMVKIKFKYKGEEHEIDTSQIKKAWRVGKMISFTYDAGGGKTGRGAISEKEAPKELLDMVEKSKK

SEQ ID NO: 278 - protein, 63 aa, unidentified
  source 1..63: note = MG161-64 functional domain
VVKVKFKYKGQEKEVEISKIKKVWRVGKMISFTYDDNGKTGRGAVSEKDAPKELLDMLAKQKK

SEQ ID NO: 279 - protein, 93 aa, unidentified
  source 1..93: note = MG161-66 functional domain
PNGTAANSYNSGNAPTLAGTYTVTANFAGNNNYSSGSSSAVVLTIGKATPVVTAVGGSFTYDGTAKTGSGSVVGVQTPAEILTPAVTFSYSGT

SEQ ID NO: 280 - protein, 61 aa, unidentified
  source 1..61: note = MG161-67 functional domain
FVSGDEPTKFQLEPGEYTLTEVTAPKGYEVAETISFTVDANGLVGSDKVEMKDAPIVEEEN

SEQ ID NO: 281 - protein, 73 aa, unidentified
  source 1..73: note = MG161-68 functional domain
PQRYQYQGVKIGMILSDIRTKGCFVRDNAPRKLWLLEKGVSFTYDSLNSVSEEKWRRYKEIFSLYYAENGDLN

SEQ ID NO: 282 - protein, 74 aa, unidentified
  source 1..74: note = MG161-69 functional domain
IPQRYEVQGVKIGKILSEIRHQGNFVRDSPERKLWLLEKGVSFTYDSLNSVSEKNWQRYKEIFSLYFAENGDLK

SEQ ID NO: 283 - protein, 98 aa, unidentified
  source 1..98: note = MG162-18 functional domain
CPRGKVSRLKAVKEEPKRSARLSAKPATAKVETKPKKAAAKDKSSDKKVQPKGKRGAKRKQAEMANQETKDLPAENGETKTEASPASDEAGEREATSD

SEQ ID NO: 284 - protein, 93 aa, unidentified
  source 1..93: note = MG162-20 functional domain
VPERKAEGDAKGEKAKAKDEPQRSARLSAKPAPPKPEPKPKKAPAQRGEKVLKGEKGKADASKEGSSPGEMETPQQTRHGKLKAMELPKESGW

SEQ ID NO: 285 - protein, 94 aa, unidentified
  source 1..94: note = MG162-21 functional domain
KPKREAEGDDAKGAKAEAKDEPQRRSARLSAKPAPPKPKTKPKRPLQRRERRYPKGKREKLTLARRGIAPQKMEMPKQTRHRKLKVLEMPSEVC

SEQ ID NO: 286 - protein, 95 aa, unidentified
  source 1..95: note = MG162-22 functional domain
PKRKSPEGPEGKEASKVTKQEPTRRSERLSAKPAPPPKPEVKPKKAIVKKVADEKPMKAKKGGPKGKKDDGPAQNGETKTNEVTEAAEEATEEKA

SEQ ID NO: 287 - protein, 109 aa, unidentified
  source 1..109: note = MG162-23 functional domain
PKRNSRSNDVEEEPKRRSSRLSAKPVPETKATKAKPQKAPAKPKKTKEVVEKAKPEEKKEEEPEVEKEEEAPAENGKAEAEPEAEAEAEAEEEAPAAAEEEEEEEEEVD

SEQ ID NO: 288 - protein, 90 aa, unidentified
  source 1..90: note = MG162-24 functional domain
PKRKTNPDTPVVEAEPMQTRKSGRLREKVVPQPEPKQKAAKAPAKAKKAKNVEKAKPEEEAAEAPAENGEAKTEDQAPAVEEAGKEEAAE

SEQ ID NO: 289 - protein, 102 aa, unidentified
  source 1..102: note = MG162-25 functional domain
PKRKVSSAEGVAKEEPKRRSVRLSAKPAPAKVESKPKKAAGKEKSSDKKVQAKWKRGAKGKQAEVANQEAKEDLPAENGETKNEESAAFDDPEEKEAMADKS

SEQ ID NO: 290 - protein, 93 aa, unidentified
  source 1..93: note = MG162-26 functional domain
PKRKAEGDAKGDKAKVKDEPQRRSARLSAKPAPPKPEPKPKKAPAKKGEKVPKGKKGKADAGKDGNNPAENGDAKTDQAQKAEGAGDAKWSVC

SEQ ID NO: 291 - protein, 100 aa, unidentified
  source 1..100: note = MG162-27 functional domain
PKRKVSSAEGAAKEEPKRRSARLSAKPAPAKVEAKPKKAAGKDKASDKKVQTKGKRGAKGKQAEVTKQEMKEDLPAENGETKSEESPASDEAGEKEAKSD

SEQ ID NO: 292 - protein, 119 aa, unidentified
  source 1..119: note = MG162-28 functional domain
PKRKAEGHDDVRQEPKRWSARLSAIPVPVTLELKPKRAWTQRKVKTKNEMMEENTDINVKAISATKKEVVKEEYNNENAANWEAKIIESLAPEKEIEIKEEKIKDVTEEGEKKESVAAE

SEQ ID NO: 293 - protein, 96 aa, unidentified
  source 1..96: note = MG162-29 functional domain
PKRKTAVTDGGEREEPQRRSARLSSRPNPPKPEPKAKKALKKEKAVNDKKEDKKTKKAKENAEAEANEENHSENGEAKTNEVEAAPEEAKEEAKSE

SEQ ID NO: 294 - protein, 72 aa, unidentified
  source 1..72: note = MG162-30 functional domain
PKRKADKKGSEEPARRSARLSAKPAPPKPAPKPKKAAPKKAAKGKKPAENGEAKADQAQKVEAAGDAKWKAF

SEQ ID NO: 295 - protein, 112 aa, unidentified
  source 1..112: note = MG162-31 functional domain
PKRNKANNDTEAAEPKRRSERLQAKPQPKSPEPKPKQKTPAKPKKVKEVEKVKPEEKKEEVEAAEPEAEAEAPAEEEEEEEEAAPAENGEAKAEEEAAATEEEPEQKEEAAE

SEQ ID NO: 296 - protein, 101 aa, unidentified
  source 1..101: note = MG162-32 functional domain
PKRKVSSAEGAAKEEPKRRSARLSAKPAPPAKVEAKPKKAAAKDKAPDRKVPAKGKRGAKGKAAEVANQEAKEDVPAENGEAKSQESPVSDAAGEKEAKAD

SEQ ID NO: 297 - protein, 95 aa, unidentified
  source 1..95: note = MG162-33 functional domain
PKRKSPEGAEGNTKVTKQEPTRRSERLSAKPAPPKPEPKPKKPAVKKAVDDKAGKGKKGPAKPKKEEKDPLPAENGETKVEEETEAAEEEAEVKE

SEQ ID NO: 298 - protein, 100 aa, unidentified
  source 1..100: note = MG162-34 functional domain
PKRKVSSAEGAAKEEPKRRSARLSAKPAPAKVETKPKKAAGKDKSSDKKVQTKGKRGAKGKQAEVANQETKEDLPAENGETKNEESPASDEAEEKEAKSD

SEQ ID NO: 299 - protein, 86 aa, unidentified
  source 1..86: note = MG162-35 functional domain
HAQRKAEVDIKGHKAKAKDEPQRRSARLSAKPAPPQPEPKPKKDPAKGEKIPKGKADADKEGNNPAENGDAKTDQAQKAEGTGDAK

SEQ ID NO: 300 - protein, 87 aa, unidentified
  source 1..87: note = MG162-36 functional domain
PKRSANAAKDTEPKRRSLRLKDRPEPPKVEAKPKPKKGPAKPKKSKEVEKAKPEEKAPEAPAENGEAKAEEDAPATDAAEQKDEAAE

SEQ ID NO: 301 - protein, 85 aa, unidentified
  source 1..85: note = MG162-37 functional domain
PKRSTASAGGDSTPKRRSPRLIDKAVAAEPKPKPKKAAAKPKKAKEVEKAKPEEKAPEAPAENGEAKAEAEAPATDEAEEKNEAE

SEQ ID NO: 302 - protein, 93 aa, unidentified
  source 1..93: note = MG162-38 functional domain
PKRKVRSRKSPRGDLRGCQLNLLLKSGNEAQKAAAKDKSSNKKVQPKGKRGAKGKQAEVANQETKDLSAESGETKTEESPASDEAGEREATSD

SEQ ID NO: 303 - protein, 101 aa, unidentified
  source 1..101: note = MG162-39 functional domain
PKRKSAEGAEGKEASKVTKQEPTRRSERLSVKPAPPKTEKSEKPEIKPKKSVVKKPVDDKGMKAKKGGMKGKKDDGPAQNGEPKTGQIYVSRPSVSVSSIR

SEQ ID NO: 304 - protein, 89 aa, unidentified
  source 1..89: note = MG162-1 functional domain
PKRKAEGDAKGDKTKVKDEPQRRSARLSAKPAPPKPESKTKKAPAKKGEKGKKGEADAGKMRIILQKMEMPRQTRHRKLKVLEMPSDVC

SEQ ID NO: 305 - protein, 79 aa, unidentified
  source 1..79: note = MG162-11 functional domain
PQRKASAMEPKRHSPRMSAKPAPAKVDARQKGQSDKRVQMKGKKGVKVRQAEVADQQTTDLPTEDWSPASEEEKDSRSD

SEQ ID NO: 306 - protein, 92 aa, unidentified
  source 1..92: note = MG162-12 functional domain
PKRKGTDGEVKEEPQRRSARLSAKPTPPKPEPKPKKTPKKEKEVNDKKEEKKAKAKAEESKEENQSENGETKTNEVEKTPDEEAEPEKEDPK

SEQ ID NO: 307 - protein, 92 aa, unidentified
  source 1..92: note = MG162-3 functional domain
PKRKRADGEAKDEPQRRSARLSARPAPAKAEPKSKKTAKKDKAVKKEDKKTKVKAKETSESAANEENHSENGDAKTNAVAKTNKEAKEAKSE

SEQ ID NO: 308 - protein, 80 aa, synthetic construct
  source 1..80: note = Engineered H1 core 1 functional domain
RTDHPKYSDMIVAAIQAEKNRAGSSRQSIQKYIKSHYKVGENADSQIKLSIKRLVTTGVLKQTKGVGASGSFRLAKSDEP

SEQ ID NO: 309 - protein, 80 aa, synthetic construct
  source 1..80: note = Engineered H1 core 2 functional domain
STRHPKYSDMIVAAIQAEKNRAGSSRQSIQKYIKSHYKVGENADSQIKLSIKRLVTTGVLKQTKGVGASGSFRLAKSDEP

SEQ ID NO: 310 - protein, 80 aa, synthetic construct
  source 1..80: note = Engineered H1 core 3 functional domain
STDHPKYSDMIVAAIRAEKNRAGSSRQSIQKYIKSHYKVGENADSQIKLSIKRLVTTGVLKQTKGVGASGSFRLAKSDEP

SEQ ID NO: 311 - protein, 80 aa, synthetic construct
  source 1..80: note = Engineered H1 core 4 functional domain
STDHPKYSDMIVAAIQAEKNRAGSSRQSIQKYIKSHYKVGEHADSQIKLSIKRLVTTGVLKQTKGVGASGSFRLAKSDEP

SEQ ID NO: 312 - protein, 80 aa, synthetic construct
  source 1..80: note = Engineered H1 core 5 functional domain
STDHPKYSDMIVAAIQAEKNRAGSSRQSIQKYIKSHYKVGENADSQIKLSIKRLVTTGVLKQTKGVGASGSFRLAKSSEP

SEQ ID NO: 313 - protein, 80 aa, synthetic construct
  source 1..80: note = Engineered H1 core 6 functional domain
STDHPKYSDMIVAAIQAEKNRAGSSRQSIQKYIKSHYKVGENADSQIKLSIKRLVTTGVLKQTKGVGASGSFRLAKSDKP

SEQ ID NO: 314 - protein, 80 aa, synthetic construct
  source 1..80: note = Engineered H1 core 7 functional domain
RTRHPKYSDMIVAAIQAEKNRAGSSRQSIQKYIKSHYKVGENADSQIKLSIKRLVTTGVLKQTKGVGASGSFRLAKSDEP

SEQ ID NO: 315 - protein, 80 aa, synthetic construct
  source 1..80: note = Engineered H1 core 8 functional domain
RTDHPKYSDMIVAAIRAEKNRAGSSRQSIQKYIKSHYKVGENADSQIKLSIKRLVTTGVLKQTKGVGASGSFRLAKSDEP

SEQ ID NO: 316 - protein, 80 aa, synthetic construct
  source 1..80: note = Engineered H1 core 9 functional domain
RTDHPKYSDMIVAAIQAEKNRAGSSRQSIQKYIKSHYKVGEHADSQIKLSIKRLVTTGVLKQTKGVGASGSFRLAKSDEP

SEQ ID NO: 317 - protein, 80 aa, synthetic construct
  source 1..80: note = Engineered H1 core 10 functional domain
RTDHPKYSDMIVAAIQAEKNRAGSSRQSIQKYIKSHYKVGENADSQIKLSIKRLVTTGVLKQTKGVGASGSFRLAKSSEP

SEQ ID NO: 318 - protein, 80 aa, synthetic construct
  source 1..80: note = Engineered H1 core 11 functional domain
RTDHPKYSDMIVAAIQAEKNRAGSSRQSIQKYIKSHYKVGENADSQIKLSIKRLVTTGVLKQTKGVGASGSFRLAKSDKP

SEQ ID NO: 319 - protein, 80 aa, synthetic construct
  source 1..80: note = Engineered H1 core 12 functional domain
STRHPKYSDMIVAAIRAEKNRAGSSRQSIQKYIKSHYKVGENADSQIKLSIKRLVTTGVLKQTKGVGASGSFRLAKSDEP

SEQ ID NO: 320 - protein, 80 aa, synthetic construct
  source 1..80: note = Engineered H1 core 13 functional domain
STRHPKYSDMIVAAIQAEKNRAGSSRQSIQKYIKSHYKVGEHADSQIKLSIKRLVTTGVLKQTKGVGASGSFRLAKSDEP

SEQ ID NO: 321 - protein, 80 aa, synthetic construct
  source 1..80: note = Engineered H1 core 14 functional domain
STRHPKYSDMIVAAIQAEKNRAGSSRQSIQKYIKSHYKVGENADSQIKLSIKRLVTTGVLKQTKGVGASGSFRLAKSSEP

SEQ ID NO: 322 - protein, 80 aa, synthetic construct
  source 1..80: note = Engineered H1 core 15 functional domain
STDHPKYSDMIVAAIRAEKNRAGSSRQSIQKYIKSHYKVGEHADSQIKLSIKRLVTTGVLKQTKGVGASGSFRLAKSDEP

SEQ ID NO: 323 - protein, 80 aa, synthetic construct
  source 1..80: note = Engineered H1 core 16 functional domain
STDHPKYSDMIVAAIRAEKNRAGSSRQSIQKYIKSHYKVGENADSQIKLSIKRLVTTGVLKQTKGVGASGSFRLAKSSEP

SEQ ID NO: 324 - protein, 80 aa, synthetic construct
  source 1..80: note = Engineered H1 core 17 functional domain
STDHPKYSDMIVAAIRAEKNRAGSSRQSIQKYIKSHYKVGENADSQIKLSIKRLVTTGVLKQTKGVGASGSFRLAKSDKP

SEQ ID NO: 325 - protein, 80 aa, synthetic construct
  source 1..80: note = Engineered H1 core 18 functional domain
STDHPKYSDMIVAAIQAEKNRAGSSRQSIQKYIKSHYKVGEHADSQIKLSIKRLVTTGVLKQTKGVGASGSFRLAKSSEP

SEQ ID NO: 326 - protein, 80 aa, synthetic construct
  source 1..80: note = Engineered H1 core 19 functional domain
STDHPKYSDMIVAAIQAEKNRAGSSRQSIQKYIKSHYKVGEHADSQIKLSIKRLVTTGVLKQTKGVGASGSFRLAKSDKP

SEQ ID NO: 327 - protein, 80 aa, synthetic construct
  source 1..80: note = Engineered H1 core 20 functional domain
STDHPKYSDMIVAAIQAEKNRAGSSRQSIQKYIKSHYKVGENADSQIKLSIKRLVTTGVLKQTKGVGASGSFRLAKSSKP

SEQ ID NO: 328 - protein, 80 aa, synthetic construct
  source 1..80: note = Engineered H1 core 21 functional domain
RTRHPKYSDMIVAAIRAEKNRAGSSRQSIQKYIKSHYKVGENADSQIKLSIKRLVTTGVLKQTKGVGASGSFRLAKSDEP

SEQ ID NO: 329 - protein, 80 aa, synthetic construct
  source 1..80: note = Engineered H1 core 22 functional domain
RTRHPKYSDMIVAAIQAEKNRAGSSRQSIQKYIKSHYKVGEHADSQIKLSIKRLVTTGVLKQTKGVGASGSFRLAKSDEP

SEQ ID NO: 330 - protein, 80 aa, synthetic construct
  source 1..80: note = Engineered H1 core 23 functional domain
RTRHPKYSDMIVAAIQAEKNRAGSSRQSIQKYIKSHYKVGENADSQIKLSIKRLVTTGVLKQTKGVGASGSFRLAKSSEP

SEQ ID NO: 331 - protein, 80 aa, synthetic construct
  source 1..80: note = Engineered H1 core 24 functional domain
RTRHPKYSDMIVAAIQAEKNRAGSSRQSIQKYIKSHYKVGENADSQIKLSIKRLVTTGVLKQTKGVGASGSFRLAKSDKP

SEQ ID NO: 332 - protein, 80 aa, synthetic construct
  source 1..80: note = Engineered H1 core 25 functional domain
RTDHPKYSDMIVAAIRAEKNRAGSSRQSIQKYIKSHYKVGEHADSQIKLSIKRLVTTGVLKQTKGVGASGSFRLAKSDEP

SEQ ID NO: 333 - protein, 80 aa, synthetic construct
  source 1..80: note = Engineered H1 core 26 functional domain
RTDHPKYSDMIVAAIRAEKNRAGSSRQSIQKYIKSHYKVGENADSQIKLSIKRLVTTGVLKQTKGVGASGSFRLAKSSEP

SEQ ID NO: 334 - protein, 80 aa, synthetic construct
  source 1..80: note = Engineered H1 core 27 functional domain
RTDHPKYSDMIVAAIRAEKNRAGSSRQSIQKYIKSHYKVGENADSQIKLSIKRLVTTGVLKQTKGVGASGSFRLAKSDKP

SEQ ID NO: 335 - protein, 80 aa, synthetic construct
  source 1..80: note = Engineered H1 core 28 functional domain
RTDHPKYSDMIVAAIQAEKNRAGSSRQSIQKYIKSHYKVGEHADSQIKLSIKRLVTTGVLKQTKGVGASGSFRLAKSSEP

SEQ ID NO: 336 - protein, 80 aa, synthetic construct
  source 1..80: note = Engineered H1 core 29 functional domain
RTDHPKYSDMIVAAIQAEKNRAGSSRQSIQKYIKSHYKVGEHADSQIKLSIKRLVTTGVLKQTKGVGASGSFRLAKSDKP

SEQ ID NO: 337 - protein, 80 aa, synthetic construct
  source 1..80: note = Engineered H1 core 30 functional domain
RTDHPKYSDMIVAAIQAEKNRAGSSRQSIQKYIKSHYKVGENADSQIKLSIKRLVTTGVLKQTKGVGASGSFRLAKSSKP

SEQ ID NO: 338 - protein, 80 aa, synthetic construct
  source 1..80: note = Engineered H1 core 31 functional domain
STRHPKYSDMIVAAIRAEKNRAGSSRQSIQKYIKSHYKVGEHADSQIKLSIKRLVTTGVLKQTKGVGASGSFRLAKSDEP

SEQ ID NO: 339 - protein, 80 aa, synthetic construct
  source 1..80: note = Engineered H1 core 32 functional domain
STRHPKYSDMIVAAIRAEKNRAGSSRQSIQKYIKSHYKVGENADSQIKLSIKRLVTTGVLKQTKGVGASGSFRLAKSSEP

SEQ ID NO: 340 - protein, 80 aa, synthetic construct
  source 1..80: note = Engineered H1 core 33 functional domain
STRHPKYSDMIVAAIRAEKNRAGSSRQSIQKYIKSHYKVGENADSQIKLSIKRLVTTGVLKQTKGVGASGSFRLAKSDKP

SEQ ID NO: 341 - protein, 80 aa, synthetic construct
  source 1..80: note = Engineered H1 core 34 functional domain
STRHPKYSDMIVAAIQAEKNRAGSSRQSIQKYIKSHYKVGEHADSQIKLSIKRLVTTGVLKQTKGVGASGSFRLAKSDKP

SEQ ID NO: 342 - protein, 80 aa, synthetic construct
  source 1..80: note = Engineered H1 core 35 functional domain
STRHPKYSDMIVAAIQAEKNRAGSSRQSIQKYIKSHYKVGENADSQIKLSIKRLVTTGVLKQTKGVGASGSFRLAKSSKP

SEQ ID NO: 343 - protein, 80 aa, synthetic construct
  source 1..80: note = Engineered H1 core 36 functional domain
STDHPKYSDMIVAAIRAEKNRAGSSRQSIQKYIKSHYKVGEHADSQIKLSIKRLVTTGVLKQTKGVGASGSFRLAKSSEP

SEQ ID NO: 344 - protein, 80 aa, synthetic construct
  source 1..80: note = Engineered H1 core 37 functional domain
STDHPKYSDMIVAAIRAEKNRAGSSRQSIQKYIKSHYKVGEHADSQIKLSIKRLVTTGVLKQTKGVGASGSFRLAKSDKP

SEQ ID NO: 345 - protein, 80 aa, synthetic construct
  source 1..80: note = Engineered H1 core 38 functional domain
STDHPKYSDMIVAAIQAEKNRAGSSRQSIQKYIKSHYKVGEHADSQIKLSIKRLVTTGVLKQTKGVGASGSFRLAKSSKP

SEQ ID NO: 346 - protein, 80 aa, synthetic construct
  source 1..80: note = Engineered H1 core 39 functional domain
RTRHPKYSDMIVAAIRAEKNRAGSSRQSIQKYIKSHYKVGEHADSQIKLSIKRLVTTGVLKQTKGVGASGSFRLAKSDEP

SEQ ID NO: 347 - protein, 80 aa, synthetic construct
  source 1..80: note = Engineered H1 core 40 functional domain
RTRHPKYSDMIVAAIRAEKNRAGSSRQSIQKYIKSHYKVGENADSQIKLSIKRLVTTGVLKQTKGVGASGSFRLAKSSEP

SEQ ID NO: 348 - protein, 80 aa, synthetic construct
  source 1..80: note = Engineered H1 core 41 functional domain
RTRHPKYSDMIVAAIRAEKNRAGSSRQSIQKYIKSHYKVGENADSQIKLSIKRLVTTGVLKQTKGVGASGSFRLAKSDKP

SEQ ID NO: 349 - protein, 80 aa, synthetic construct
  source 1..80: note = Engineered H1 core 42 functional domain
RTRHPKYSDMIVAAIQAEKNRAGSSRQSIQKYIKSHYKVGEHADSQIKLSIKRLVTTGVLKQTKGVGASGSFRLAKSSEP

SEQ ID NO: 350 - protein, 80 aa, synthetic construct
  source 1..80: note = Engineered H1 core 43 functional domain
RTRHPKYSDMIVAAIQAEKNRAGSSRQSIQKYIKSHYKVGEHADSQIKLSIKRLVTTGVLKQTKGVGASGSFRLAKSDKP

SEQ ID NO: 351 - protein, 80 aa, synthetic construct
  source 1..80: note = Engineered H1 core 44 functional domain
RTRHPKYSDMIVAAIQAEKNRAGSSRQSIQKYIKSHYKVGENADSQIKLSIKRLVTTGVLKQTKGVGASGSFRLAKSSKP

SEQ ID NO: 352 - protein, 80 aa, synthetic construct
  source 1..80: note = Engineered H1 core 45 functional domain
RTDHPKYSDMIVAAIRAEKNRAGSSRQSIQKYIKSHYKVGEHADSQIKLSIKRLVTTGVLKQTKGVGASGSFRLAKSSEP

SEQ ID NO: 353 - protein, 80 aa, synthetic construct
  source 1..80: note = Engineered H1 core 46 functional domain
RTDHPKYSDMIVAAIRAEKNRAGSSRQSIQKYIKSHYKVGEHADSQIKLSIKRLVTTGVLKQTKGVGASGSFRLAKSDKP

SEQ ID NO: 354 - protein, 80 aa, synthetic construct
  source 1..80: note = Engineered H1 core 47 functional domain
RTDHPKYSDMIVAAIRAEKNRAGSSRQSIQKYIKSHYKVGENADSQIKLSIKRLVTTGVLKQTKGVGASGSFRLAKSSKP

SEQ ID NO: 355 - protein, 80 aa, synthetic construct
  source 1..80: note = Engineered H1 core 48 functional domain
RTDHPKYSDMIVAAIQAEKNRAGSSRQSIQKYIKSHYKVGEHADSQIKLSIKRLVTTGVLKQTKGVGASGSFRLAKSSKP

SEQ ID NO: 356 - protein, 80 aa, synthetic construct
  source 1..80: note = Engineered H1 core 49 functional domain
STRHPKYSDMIVAAIRAEKNRAGSSRQSIQKYIKSHYKVGEHADSQIKLSIKRLVTTGVLKQTKGVGASGSFRLAKSSEP

SEQ ID NO: 357 - protein, 80 aa, synthetic construct
  source 1..80: note = Engineered H1 core 50 functional domain
STRHPKYSDMIVAAIRAEKNRAGSSRQSIQKYIKSHYKVGEHADSQIKLSIKRLVTTGVLKQTKGVGASGSFRLAKSDKP

SEQ ID NO: 358 - protein, 80 aa, synthetic construct
  source 1..80: note = Engineered H1 core 51 functional domain
STRHPKYSDMIVAAIRAEKNRAGSSRQSIQKYIKSHYKVGENADSQIKLSIKRLVTTGVLKQTKGVGASGSFRLAKSSKP

SEQ ID NO: 359 - protein, 80 aa, synthetic construct
  source 1..80: note = Engineered H1 core 52 functional domain
STRHPKYSDMIVAAIQAEKNRAGSSRQSIQKYIKSHYKVGEHADSQIKLSIKRLVTTGVLKQTKGVGASGSFRLAKSSKP

SEQ ID NO: 360 - DNA, 19 bp, synthetic construct
  source 1..19: mol_type = other DNA; note = ddPCR LE primer fwd
tgggaccaccttatattcc

SEQ ID NO: 361 - DNA, 20 bp, synthetic construct
  source 1..20: mol_type = other DNA; note = ddPCR LE primer rev
cagtaataagcacacgacac

SEQ ID NO: 362 - DNA, 16 bp, synthetic construct
  source 1..16: mol_type = other DNA; note = ddPCR LE probe
tctggttctgggtact

SEQ ID NO: 363 - DNA, 23 bp, synthetic construct
  source 1..23: mol_type = other DNA; note = ddPCR RE primer fwd
aaagtgccattcgggtaaatgac

SEQ ID NO: 364 - DNA, 22 bp, synthetic construct
  source 1..22: mol_type = other DNA; note = ddPCR RE primer rev
agagagatggctccaggaaatg

SEQ ID NO: 365 - DNA, 20 bp, synthetic construct
  source 1..20: mol_type = other DNA; note = ddPCR RE probe
ccttatctggtgacacaccc

SEQ ID NO: 366 - DNA, 38 bp, synthetic construct; identical to SEQ ID NO: 250
  source 1..38: mol_type = other DNA; note = AAVS1-5 NGS primer fwd

SEQ ID NO: 367 - DNA, 38 bp, synthetic construct; identical to SEQ ID NO: 253
  source 1..38: mol_type = other DNA; note = AAVS1-5 NGS primer rev

SEQ ID NO: 368 - DNA, 95 bp, Homo sapiens; identical to SEQ ID NO: 252
  source 1..95: mol_type = other DNA; note = AAVS1-5 primer binding sequence

SEQ ID NO: 369 - DNA, 418 bp, synthetic construct; identical to SEQ ID NO: 255
  source 1..418: mol_type = other DNA; note = AAVS 1-5 reference genomic sequence

SEQ ID NO: 370 - DNA, 418 bp, synthetic construct; identical to SEQ ID NO: 254
  source 1..418: mol_type = other DNA; note = AAVS1-5 transposition sequence

SEQ ID NO: 371 - DNA, 20 bp, synthetic construct
  source 1..20: mol_type = other DNA; note = LE spacer sequence
aaataatctgttaatgtaca

SEQ ID NO: 372 - DNA, 38 bp, synthetic construct
  source 1..38: mol_type = other DNA; note = 1077 Primer Fwd
gctcttccgatctnnnnntggcacaatgaagtgggtaa

SEQ ID NO: 373 - DNA, 38 bp, synthetic construct; identical to SEQ ID NO: 372
  source 1..38: mol_type = other DNA; note = 1078 Primer Fwd

SEQ ID NO: 374 - DNA, 38 bp, synthetic construct; identical to SEQ ID NO: 372
  source 1..38: mol_type = other DNA; note = 1079 Primer Fwd

SEQ ID NO: 375 - DNA, 38 bp, synthetic construct
  source 1..38: mol_type = other DNA; note = 1080 Primer Fwd
gctcttccgatctnnnnncgtcgagatgcacgtaagaa

SEQ ID NO: 376 - DNA, 38 bp, synthetic construct; identical to SEQ ID NO: 375
  source 1..38: mol_type = other DNA; note = 1081 Primer Fwd

SEQ ID NO: 377 - DNA, 38 bp, synthetic construct; identical to SEQ ID NO: 375
  source 1..38: mol_type = other DNA; note = 1082 Primer Fwd

SEQ ID NO: 378 - DNA, 38 bp, synthetic construct; identical to SEQ ID NO: 375
  source 1..38: mol_type = other DNA; note = 1083 Primer Fwd

SEQ ID NO: 379 - DNA, 38 bp, synthetic construct; identical to SEQ ID NO: 375
  source 1..38: mol_type = other DNA; note = 1084 Primer Fwd

SEQ ID NO: 380 - DNA, 38 bp, synthetic construct; identical to SEQ ID NO: 375
  source 1..38: mol_type = other DNA; note = 1085 Primer Fwd

SEQ ID NO: 381 - DNA, 38 bp, synthetic construct; identical to SEQ ID NO: 375
  source 1..38: mol_type = other DNA; note = 1086 Primer Fwd

SEQ ID NO: 382 - DNA, 40 bp, synthetic construct
  source 1..40: mol_type = other DNA; note = 1087 Primer Fwd
gctcttccgatctnnnnnggcatttatttctaaaatggca

SEQ ID NO: 383 - DNA, 39 bp, synthetic construct
  source 1..39: mol_type = other DNA; note = 1088 Primer Fwd
gctcttccgatctnnnnntgtaattttcttttgcgcact

SEQ ID NO: 384 - DNA, 38 bp, synthetic construct
  source 1..38: mol_type = other DNA; note = 1089 Primer Fwd
gctcttccgatctnnnnntttgcgcactaaggaaagtg

SEQ ID NO: 385 - DNA, 38 bp, synthetic construct
  source 1..38: mol_type = other DNA; note = 1090 Primer Fwd
gctcttccgatctnnnnncgcactaaggaaagtgcaaa

SEQ ID NO: 386 - DNA, 38 bp, synthetic construct; identical to SEQ ID NO: 385
  source 1..38: mol_type = other DNA; note = 1091 Primer Fwd

SEQ ID NO: 387 - DNA, 38 bp, synthetic construct; identical to SEQ ID NO: 385
  source 1..38: mol_type = other DNA; note = 1092 Primer Fwd

SEQ ID NO: 388 - DNA, 38 bp, synthetic construct; identical to SEQ ID NO: 385
  source 1..38: mol_type = other DNA; note = 1093 Primer Fwd

SEQ ID NO: 389 - DNA, 38 bp, synthetic construct; identical to SEQ ID NO: 385
  source 1..38: mol_type = other DNA; note = 1094 Primer Fwd

SEQ ID NO: 390 - DNA, 38 bp, synthetic construct
  source 1..38: mol_type = other DNA; note = 1095 Primer Fwd
gctcttccgatctnnnnncccaaagacctatccattgc

SEQ ID NO: 391 - DNA, 38 bp, synthetic construct; identical to SEQ ID NO: 390
  source 1..38: mol_type = other DNA; note = 1096 Primer Fwd

SEQ ID NO: 392 - DNA, 38 bp, synthetic construct; identical to SEQ ID NO: 390
  source 1..38: mol_type = other DNA; note = 1097 Primer Fwd

SEQ ID NO: 393 - DNA, 38 bp, synthetic construct; identical to SEQ ID NO: 390
  source 1..38: mol_type = other DNA; note = 1098 Primer Fwd

SEQ ID NO: 394 - DNA, 38 bp, synthetic construct; identical to SEQ ID NO: 390
  source 1..38: mol_type = other DNA; note = 1099 Primer Fwd

SEQ ID NO: 395 - DNA, 38 bp, synthetic construct; identical to SEQ ID NO: 390
  source 1..38: mol_type = other DNA; note = 1100 Primer Fwd

SEQ ID NO: 396 - DNA, 38 bp, synthetic construct; identical to SEQ ID NO: 390
  source 1..38: mol_type = other DNA; note = 1101 Primer Fwd

SEQ ID NO: 397 - DNA, 38 bp, synthetic construct; identical to SEQ ID NO: 390
  source 1..38: mol_type = other DNA; note = 1102 Primer Fwd

SEQ ID NO: 398 - DNA, 38 bp, synthetic construct; identical to SEQ ID NO: 390
  source 1..38: mol_type = other DNA; note = 1103 Primer Fwd

SEQ ID NO: 399 - DNA, 39 bp, synthetic construct
  source 1..39: mol_type = other DNA; note = 1104 Primer Fwd
gctcttccgatctnnnnntgtcttcttggttgctgttga

SEQ ID NO: 400 - DNA, 39 bp, synthetic construct; identical to SEQ ID NO: 399
  source 1..39: mol_type = other DNA; note = 1105 Primer Fwd

SEQ ID NO: 401 - DNA, 39 bp, synthetic construct; identical to SEQ ID NO: 399
  source 1..39: mol_type = other DNA; note = 1106 Primer Fwd

SEQ ID NO: 402 - DNA, 39 bp, synthetic construct; identical to SEQ ID NO: 399
  source 1..39: mol_type = other DNA; note = 1107 Primer Fwd

SEQ ID NO: 403 - DNA, 39 bp, synthetic construct; identical to SEQ ID NO: 399
  source 1..39: mol_type = other DNA; note = 1108 Primer Fwd

SEQ ID NO: 404 - DNA, 39 bp, synthetic construct; identical to SEQ ID NO: 399
  source 1..39: mol_type = other DNA; note = 1109 Primer Fwd

SEQ ID NO: 405 - DNA, 39 bp, synthetic construct
  source 1..39: mol_type = other DNA; note = 1110 Primer Fwd
gctcttccgatctnnnnntctgtaggaatcagagcccaa

SEQ ID NO: 406 - DNA, 39 bp, synthetic construct; identical to SEQ ID NO: 405
  source 1..39: mol_type = other DNA; note = 1111 Primer Fwd

SEQ ID NO: 407 - DNA, 39 bp, synthetic construct; identical to SEQ ID NO: 405
  source 1..39: mol_type = other DNA; note = 1112 Primer Fwd

SEQ ID NO: 408 - DNA, 37 bp, synthetic construct
  source 1..37: mol_type = other DNA; note = 1113 Primer Fwd
gctcttccgatctnnnnntttttcttcccttgcccag

SEQ ID NO: 409 - DNA, 38 bp, synthetic construct
  source 1..38: mol_type = other DNA; note = 1114 Primer Fwd
gctcttccgatctnnnnnaaaccgatgagcaacctcac

SEQ ID NO: 410 - DNA, 38 bp, synthetic construct; identical to SEQ ID NO: 409
  source 1..38: mol_type = other DNA; note = 1115 Primer Fwd

SEQ ID NO: 411 - DNA, 38 bp, synthetic construct; identical to SEQ ID NO: 409
  source 1..38: mol_type = other DNA; note = 1116 Primer Fwd

SEQ ID NO: 412 - DNA, 38 bp, synthetic construct; identical to SEQ ID NO: 409
  source 1..38: mol_type = other DNA; note = 1117 Primer Fwd

SEQ ID NO: 413 - DNA, 38 bp, synthetic construct; identical to SEQ ID NO: 409
  source 1..38: mol_type = other DNA; note = 1118 Primer Fwd

SEQ ID NO: 414 - DNA, 38 bp, synthetic construct; identical to SEQ ID NO: 409
  source 1..38: mol_type = other DNA; note = 1119 Primer Fwd

SEQ ID NO: 415 - DNA, 39 bp, synthetic construct
  source 1..39: mol_type = other DNA; note = 1120 Primer Fwd
gctcttccgatctnnnnntcaacagcaaccaagaagaca

SEQ ID NO: 416 - DNA, 39 bp, synthetic construct; identical to SEQ ID NO: 415
  source 1..39: mol_type = other DNA; note = 1121 Primer Fwd

SEQ ID NO: 417 - DNA, 39 bp, synthetic construct
  source 1..39: mol_type = other DNA; note = 1122 Primer Fwd
gctcttccgatctnnnnncagcacaggttttgtggtttt

SEQ ID NO: 418 - DNA, 39 bp, synthetic construct; identical to SEQ ID NO: 417
  source 1..39: mol_type = other DNA; note = 1123 Primer Fwd

SEQ ID NO: 419 - DNA, 38 bp, synthetic construct
  source 1..38: mol_type = other DNA; note = 1124 Primer Fwd
gctcttccgatctnnnnngcaatggataggtctttggg

SEQ ID NO: 420 - DNA, 38 bp, synthetic construct; identical to SEQ ID NO: 419
  source 1..38: mol_type = other DNA; note = 1125 Primer Fwd

SEQ ID NO: 421 - DNA, 38 bp, synthetic construct; identical to SEQ ID NO: 419
  source 1..38: mol_type = other DNA; note = 1126 Primer Fwd

SEQ ID NO: 422 - DNA, 38 bp, synthetic construct; identical to SEQ ID NO: 419
  source 1..38: mol_type = other DNA; note = 1127 Primer Fwd

SEQ ID NO: 423 - DNA, 38 bp, synthetic construct; identical to SEQ ID NO: 419
  source 1..38: mol_type = other DNA; note = 1128 Primer Fwd

SEQ ID NO: 424 - DNA, 38 bp, synthetic construct; identical to SEQ ID NO: 419
  source 1..38: mol_type = other DNA; note = 1129 Primer Fwd

SEQ ID NO: 425 - DNA, 38 bp, synthetic construct; identical to SEQ ID NO: 419
  source 1..38: mol_type = other DNA; note = 1130 Primer Fwd

SEQ ID NO: 426 - DNA, 38 bp, synthetic construct; identical to SEQ ID NO: 419
  source 1..38: mol_type = other DNA; note = 1131 Primer Fwd

SEQ ID NO: 427 - DNA, 38 bp, synthetic construct; identical to SEQ ID NO: 419
  source 1..38: mol_type = other DNA; note = 1132 Primer Fwd

SEQ ID NO: 428 - DNA, 38 bp, synthetic construct; identical to SEQ ID NO: 419
  source 1..38: mol_type = other DNA; note = 1133 Primer Fwd

SEQ ID NO: 429 - DNA, 38 bp, synthetic construct; identical to SEQ ID NO: 419
  source 1..38: mol_type = other DNA; note = 1134 Primer Fwd

SEQ ID NO: 430 - DNA, 38 bp, synthetic construct; identical to SEQ ID NO: 419
  source 1..38: mol_type = other DNA; note = 1135 Primer Fwd

SEQ ID NO: 431 - DNA, 38 bp, synthetic construct; identical to SEQ ID NO: 419
  source 1..38: mol_type = other DNA; note = 1136 Primer Fwd

SEQ ID NO: 432 - DNA, 38 bp, synthetic construct; identical to SEQ ID NO: 419
  source 1..38: mol_type = other DNA; note = 1137 Primer Fwd

SEQ ID NO: 433 - DNA, 38 bp, synthetic construct
  source 1..38: mol_type = other DNA; note = 1138 Primer Fwd
gctcttccgatctnnnnntttgcactttccttagtgcg

SEQ ID NO: 434 - DNA, 38 bp, synthetic construct
  source 1..38: mol_type = other DNA; note = 1139 Primer Fwd
gctcttccgatctnnnnncggttaatgtggctctggtt

SEQ ID NO: 435 - DNA, 38 bp, synthetic construct; identical to SEQ ID NO: 434
  source 1..38: mol_type = other DNA; note = 1140 Primer Fwd

SEQ ID NO: 436 - DNA, 38 bp, synthetic construct
  source 1..38: mol_type = other DNA; note = 1141 Primer Fwd
gctcttccgatctnnnnntttttccaggggtgtgtttc

SEQ ID NO: 437 - DNA, 38 bp, synthetic construct; identical to SEQ ID NO: 436
  source 1..38: mol_type = other DNA; note = 1142 Primer Fwd

SEQ ID NO: 438 - DNA, 41 bp, synthetic construct
  source 1..41: mol_type = other DNA; note = 1143 Primer Fwd
gctcttccgatctnnnnntcattatttgcatctgagaaccc

SEQ ID NO: 439 - DNA, 40 bp, synthetic construct
  source 1..40: mol_type = other DNA; note = 1144 Primer Fwd
gctcttccgatctnnnnnttgcatctgagaacccttaggt

SEQ ID NO: 440 - DNA, 40 bp, synthetic construct; identical to SEQ ID NO: 439
  source 1..40: mol_type = other DNA; note = 1145 Primer Fwd

SEQ ID NO: 441 - DNA, 39 bp, synthetic construct
  source 1..39: mol_type = other DNA; note = 1146 Primer Fwd
gctcttccgatctnnnnntttgatgacaataatggggga

SEQ ID NO: 442 - DNA, 38 bp, synthetic construct
  source 1..38: mol_type = other DNA; note = 1147 Primer Fwd
gctcttccgatctnnnnnttacggtctcatagggcctg

SEQ ID NO: 443 - DNA, 38 bp, synthetic construct; identical to SEQ ID NO: 442
  source 1..38: mol_type = other DNA; note = 1148 Primer Fwd

SEQ ID NO: 444 - DNA, 38 bp, synthetic construct; identical to SEQ ID NO: 442
  source 1..38: mol_type = other DNA; note = 1149 Primer Fwd

SEQ ID NO: 445 - DNA, 38 bp, synthetic construct; identical to SEQ ID NO: 442
  source 1..38: mol_type = other DNA; note = 1150 Primer Fwd

SEQ ID NO: 446 - DNA, 38 bp, synthetic construct; identical to SEQ ID NO: 442
  source 1..38: mol_type = other DNA; note = 1151 Primer Fwd

SEQ ID NO: 447 - DNA, 38 bp, synthetic construct; identical to SEQ ID NO: 442
  source 1..38: mol_type = other DNA; note = 1152 Primer Fwd

SEQ ID NO: 448 - DNA, 38 bp, synthetic construct; identical to SEQ ID NO: 442
  source 1..38: mol_type = other DNA; note = 1153 Primer Fwd

SEQ ID NO: 449 - DNA, 38 bp, synthetic construct; identical to SEQ ID NO: 442
  source 1..38: mol_type = other DNA; note = 1154 Primer Fwd

SEQ ID NO: 450 - DNA, 38 bp, synthetic construct; identical to SEQ ID NO: 442
  source 1..38: mol_type = other DNA; note = 1155 Primer Fwd

SEQ ID NO: 451 - DNA, 40 bp, synthetic construct
  source 1..40: mol_type = other DNA; note = 1156 Primer Fwd
gctcttccgatctnnnnntgagtgtagcagagaggaacca

SEQ ID NO: 452 - DNA, 38 bp, synthetic construct
  source 1..38: mol_type = other DNA; note = 1157 Primer Fwd
gctcttccgatctnnnnnagcagagaggaaccattgcc

SEQ ID NO: 453 - DNA, 38 bp, synthetic construct
  source 1..38: mol_type = other DNA; note = 1158 Primer Fwd
gctcttccgatctnnnnnttgccaccttcagattttcc

SEQ ID NO: 454 - DNA, 38 bp, synthetic construct; identical to SEQ ID NO: 453
  source 1..38: mol_type = other DNA; note = 1159 Primer Fwd

SEQ ID NO: 455 - DNA, 38 bp, synthetic construct; identical to SEQ ID NO: 453
  source 1..38: mol_type = other DNA; note = 1160 Primer Fwd

SEQ ID NO: 456 - DNA, 38 bp, synthetic construct; identical to SEQ ID NO: 453
  source 1..38: mol_type = other DNA; note = 1161 Primer Fwd

SEQ ID NO: 457 - DNA, 38 bp, synthetic construct; identical to SEQ ID NO: 453
  source 1..38: mol_type = other DNA; note = 1162 Primer Fwd

SEQ ID NO: 458 - DNA, 38 bp, synthetic construct
  source 1..38: mol_type = other DNA; note = 1163 Primer Fwd
gctcttccgatctnnnnntcattataccgatgggcgat

SEQ ID NO: 459 - DNA, 38 bp, synthetic construct; identical to SEQ ID NO: 458
  source 1..38: mol_type = other DNA; note = 1164 Primer Fwd

SEQ ID NO: 460 - DNA, 38 bp, synthetic construct; identical to SEQ ID NO: 458
  source 1..38: mol_type = other DNA; note = 1165 Primer Fwd

SEQ ID NO: 461 - DNA, 38 bp, synthetic construct
  source 1..38: mol_type = other DNA; note = 1166 Primer Fwd
gctcttccgatctnnnnnggaaaatctgaaggtggcaa

SEQ ID NO: 462 - DNA, 38 bp, synthetic construct; identical to SEQ ID NO: 461
  source 1..38: mol_type = other DNA; note = 1167 Primer Fwd

SEQ ID NO: 463 - DNA, 38 bp, synthetic construct; identical to SEQ ID NO: 461
  source 1..38: mol_type = other DNA; note = 1168 Primer Fwd

SEQ ID NO: 464 - DNA, 38 bp, synthetic construct; identical to SEQ ID NO: 461
  source 1..38: mol_type = other DNA; note = 1169 Primer Fwd

SEQ ID NO: 465 - DNA, 38 bp, synthetic construct; identical to SEQ ID NO: 461
  source 1..38: mol_type = other DNA; note = 1170 Primer Fwd

SEQ ID NO: 466 - DNA, 38 bp, synthetic construct; identical to SEQ ID NO: 461
  source 1..38: mol_type = other DNA; note = 1171 Primer Fwd

SEQ ID NO: 467 - DNA, 38 bp, synthetic construct; identical to SEQ ID NO: 461
  source 1..38: mol_type = other DNA; note = 1172 Primer Fwd

SEQ ID NO: 468 - DNA, 38 bp, synthetic construct; identical to SEQ ID NO: 461
  source 1..38: mol_type = other DNA; note = 1173 Primer Fwd

SEQ ID NO: 469 - DNA, 38 bp, synthetic construct; identical to SEQ ID NO: 461
  source 1..38: mol_type = other DNA; note = 1174 Primer Fwd

SEQ ID NO: 470 - DNA, 38 bp, synthetic construct; identical to SEQ ID NO: 461
  source 1..38: mol_type = other DNA; note = 1175 Primer Fwd

SEQ ID NO: 471 - DNA, 38 bp, synthetic construct; identical to SEQ ID NO: 461
  source 1..38: mol_type = other DNA; note = 1176 Primer Fwd

SEQ ID NO: 472 - DNA, 38 bp, synthetic construct
  source 1..38: mol_type = other DNA; note = 1177 Primer Fwd
gctcttccgatctnnnnncaggccctatgagaccgtaa

SEQ ID NO: 473 - DNA, 38 bp, synthetic construct; identical to SEQ ID NO: 472
  source 1..38: mol_type = other DNA; note = 1178 Primer Fwd

SEQ ID NO: 474 - DNA, 38 bp, synthetic construct; identical to SEQ ID NO: 472
  source 1..38: mol_type = other DNA; note = 1179 Primer Fwd

SEQ ID NO: 475 - DNA, 38 bp, synthetic construct; identical to SEQ ID NO: 472
  source 1..38: mol_type = other DNA; note = 1180 Primer Fwd

SEQ ID NO: 476 - DNA, 38 bp, synthetic construct; identical to SEQ ID NO: 472
  source 1..38: mol_type = other DNA; note = 1181 Primer Fwd

SEQ ID NO: 477 - DNA, 38 bp, synthetic construct; identical to SEQ ID NO: 472
  source 1..38: mol_type = other DNA; note = 1182 Primer Fwd

SEQ ID NO: 478 - DNA, 38 bp, synthetic construct
  source 1..38: mol_type = other DNA; note = 1183 Primer Fwd
gctcttccgatctnnnnncgtgttcgtgcaagttgagt

SEQ ID NO: 479 - DNA, 38 bp, synthetic construct; identical to SEQ ID NO: 478
  source 1..38: mol_type = other DNA; note = 1184 Primer Fwd

SEQ ID NO: 480 - DNA, 38 bp, synthetic construct; identical to SEQ ID NO: 478
  source 1..38: mol_type = other DNA; note = 1185 Primer Fwd

SEQ ID NO: 481 - DNA, 38 bp, synthetic construct; identical to SEQ ID NO: 478
  source 1..38: mol_type = other DNA; note = 1186 Primer Fwd

SEQ ID NO: 482 - DNA, 38 bp, synthetic construct; identical to SEQ ID NO: 478
  source 1..38: mol_type = other DNA; note = 1187 Primer Fwd

SEQ ID NO: 483 - DNA, 38 bp, synthetic construct
  source 1..38: mol_type = other DNA; note = 1188 Primer Fwd
gctcttccgatctnnnnngttcgtgcaagttgagtcca

SEQ ID NO: 484 - DNA, 38 bp, synthetic construct; identical to SEQ ID NO: 483
  source 1..38: mol_type = other DNA; note = 1189 Primer Fwd

SEQ ID NO: 485 - DNA, 38 bp, synthetic construct
  source 1..38: mol_type = other DNA; note = 1190 Primer Fwd
gctcttccgatctnnnnnacgtttccgacttgagttgc

SEQ ID NO: 486 - DNA, 38 bp, synthetic construct; identical to SEQ ID NO: 485
  source 1..38: mol_type = other DNA; note = 1191 Primer Fwd

SEQ ID NO: 487 - DNA, 38 bp, synthetic construct; identical to SEQ ID NO: 485
  source 1..38: mol_type = other DNA; note = 1192 Primer Fwd

SEQ ID NO: 488 - DNA, 38 bp, synthetic construct; identical to SEQ ID NO: 485
  source 1..38: mol_type = other DNA; note = 1193 Primer Fwd

SEQ ID NO: 489 - DNA, 38 bp, synthetic construct; identical to SEQ ID NO: 485
  source 1..38: mol_type = other DNA; note = 1194 Primer Fwd

SEQ ID NO: 490 - DNA, 38 bp, synthetic construct
  source 1..38: mol_type = other DNA; note = 1195 Primer Fwd
gctcttccgatctnnnnngcacttgctctcccaaagtc

SEQ ID NO: 491 - DNA, 38 bp, synthetic construct
  source 1..38: mol_type = other DNA; note = 1196 Primer Fwd
gctcttccgatctnnnnnactcgggtgagcatgtcttt

SEQ ID NO: 492 - DNA, 38 bp, synthetic construct; identical to SEQ ID NO: 490
  source 1..38: mol_type = other DNA; note = 1197 Primer Fwd

SEQ ID NO: 493 - DNA, 38 bp, synthetic construct; identical to SEQ ID NO: 490
  source 1..38: mol_type = other DNA; note = 1198 Primer Fwd

SEQ ID NO: 494 - DNA, 38 bp, synthetic construct; identical to SEQ ID NO: 490
  source 1..38: mol_type = other DNA; note = 1199 Primer Fwd

SEQ ID NO: 495 - DNA, 38 bp, synthetic construct; identical to SEQ ID NO: 490
  source 1..38: mol_type = other DNA; note = 1200 Primer Fwd

SEQ ID NO: 496 - DNA, 38 bp, synthetic construct; identical to SEQ ID NO: 490
  source 1..38: mol_type = other DNA; note = 1201 Primer Fwd

SEQ ID NO: 497 - DNA, 38 bp, synthetic construct; identical to SEQ ID NO: 490
  source 1..38: mol_type = other DNA; note = 1202 Primer Fwd

SEQ ID NO: 498 - DNA, 38 bp, synthetic construct; identical to SEQ ID NO: 490
  source 1..38: mol_type = other DNA; note = 1203 Primer Fwd

SEQ ID NO: 499 - DNA, 38 bp, synthetic construct; identical to SEQ ID NO: 490
  source 1..38: mol_type = other DNA; note = 1204 Primer Fwd

SEQ ID NO: 500 - DNA, 38 bp, synthetic construct
  source 1..38: mol_type = other DNA; note = 1205 Primer Fwd
gctcttccgatctnnnnntcccaaagtcgctctgagtt

SEQ ID NO: 501 - DNA, 38 bp, synthetic construct; identical to SEQ ID NO: 500
  source 1..38: mol_type = other DNA; note = 1206 Primer Fwd

SEQ ID NO: 502 - DNA, 38 bp, synthetic construct
  source 1..38: mol_type = other DNA; note = 1207 Primer Fwd
gctcttccgatctnnnnnaaggctaacctggtgtgtgg

SEQ ID NO: 503 - DNA, 38 bp, synthetic construct; identical to SEQ ID NO: 502
  source 1..38: mol_type = other DNA; note = 1208 Primer Fwd

SEQ ID NO: 504 - DNA, 38 bp, synthetic construct; identical to SEQ ID NO: 502
  source 1..38: mol_type = other DNA; note = 1209 Primer Fwd

SEQ ID NO: 505 - DNA, 38 bp, synthetic construct; identical to SEQ ID NO: 502
  source 1..38: mol_type = other DNA; note = 1210 Primer Fwd

SEQ ID NO: 506 - DNA, 38 bp, synthetic construct; identical to SEQ ID NO: 502
  source 1..38: mol_type = other DNA; note = 1211 Primer Fwd

SEQ ID NO: 507 - DNA, 38 bp, synthetic construct; identical to SEQ ID NO: 502
  source 1..38: mol_type = other DNA; note = 1212 Primer Fwd

SEQ ID NO: 508 - DNA, 38 bp, synthetic construct; identical to SEQ ID NO: 502
  source 1..38: mol_type = other DNA; note = 1213 Primer Fwd

SEQ ID NO: 509 - DNA, 38 bp, synthetic construct; identical to SEQ ID NO: 502
  source 1..38: mol_type = other DNA; note = 1214 Primer Fwd

SEQ ID NO: 510 - DNA, 38 bp, synthetic construct; identical to SEQ ID NO: 502
  source 1..38: mol_type = other DNA; note = 1215 Primer Fwd

SEQ ID NO: 511 - DNA, 38 bp, synthetic construct; identical to SEQ ID NO: 502
  source 1..38: mol_type = other DNA; note = 1216 Primer Fwd

SEQ ID NO: 512 - DNA, 38 bp, synthetic construct; identical to SEQ ID NO: 502
  source 1..38: mol_type = other DNA; note = 1217 Primer Fwd

SEQ ID NO: 513 - DNA, 38 bp, synthetic construct; identical to SEQ ID NO: 502
  source 1..38: mol_type = other DNA; note = 1218 Primer Fwd

SEQ ID NO: 514 - DNA, 38 bp, synthetic construct; identical to SEQ ID NO: 502
  source 1..38: mol_type = other DNA; note = 1219 Primer Fwd

SEQ ID NO: 515 - DNA, 38 bp, synthetic construct; identical to SEQ ID NO: 502
  source 1..38: mol_type = other DNA; note = 1220 Primer Fwd

SEQ ID NO: 516 - DNA, 38 bp, synthetic construct
  source 1..38: mol_type = other DNA; note = 1221 Primer Fwd
gctcttccgatctnnnnnattattgcttgtgatccgcc

SEQ ID NO: 517 - DNA, 38 bp, synthetic construct; identical to SEQ ID NO: 516
  source 1..38: mol_type = other DNA; note = 1222 Primer Fwd

SEQ ID NO: 518 - DNA, 38 bp, synthetic construct; identical to SEQ ID NO: 516
  source 1..38: mol_type = other DNA; note = 1223 Primer Fwd

SEQ ID NO: 519 - DNA, 38 bp, synthetic construct; identical to SEQ ID NO: 516
  source 1..38: mol_type = other DNA; note = 1224 Primer Fwd

SEQ ID NO: 520 - DNA, 38 bp, synthetic construct; identical to SEQ ID NO: 516
  source 1..38: mol_type = other DNA; note = 1225 Primer Fwd

SEQ ID NO: 521 - DNA, 38 bp, synthetic construct; identical to SEQ ID NO: 516
  source 1..38: mol_type = other DNA; note = 1226 Primer Fwd

SEQ ID NO: 522 - DNA, 38 bp, synthetic construct; identical to SEQ ID NO: 516
  source 1..38: mol_type = other DNA; note = 1227 Primer Fwd

SEQ ID NO: 523 - DNA, 38 bp, synthetic construct; identical to SEQ ID NO: 516
  source 1..38: mol_type = other DNA; note = 1228 Primer Fwd

SEQ ID NO: 524 - DNA, 38 bp, synthetic construct; identical to SEQ ID NO: 516
  source 1..38: mol_type = other DNA; note = 1229 Primer Fwd

SEQ ID NO: 525 - DNA, 38 bp, synthetic construct; identical to SEQ ID NO: 516
  source 1..38: mol_type = other DNA; note = 1230 Primer Fwd

SEQ ID NO: 526 - DNA, 38 bp, synthetic construct; identical to SEQ ID NO: 516
  source 1..38: mol_type = other DNA; note = 1231 Primer Fwd

SEQ ID NO: 527 - DNA, 38 bp, synthetic construct
  source 1..38: mol_type = other DNA; note = 1232 Primer Fwd
gctcttccgatctnnnnnacagagcattggcattttcc

SEQ ID NO: 528 - DNA, 38 bp, synthetic construct; identical to SEQ ID NO: 527
  source 1..38: mol_type = other DNA; note = 1233 Primer Fwd

SEQ ID NO: 529 - DNA, 38 bp, synthetic construct; identical to SEQ ID NO: 527
  source 1..38: mol_type = other DNA; note = 1234 Primer Fwd

SEQ ID NO: 530 - DNA, 38 bp, synthetic construct
  source 1..38: mol_type = other DNA; note = 1235 Primer Fwd
gctcttccgatctnnnnnggatcaaggcaaaggatcaa

SEQ ID NO: 531 - DNA, 38 bp, synthetic construct; identical to SEQ ID NO: 530
  source 1..38: mol_type = other DNA; note = 1236 Primer Fwd

SEQ ID NO: 532 - DNA, 38 bp, synthetic construct; identical to SEQ ID NO: 530
  source 1..38: mol_type = other DNA; note = 1237 Primer Fwd

SEQ ID NO: 533 - DNA, 38 bp, synthetic construct; identical to SEQ ID NO: 530
  source 1..38: mol_type = other DNA; note = 1238 Primer Fwd

SEQ ID NO: 534 - DNA, 38 bp, synthetic construct; identical to SEQ ID NO: 530
  source 1..38: mol_type = other DNA; note = 1239 Primer Fwd

SEQ ID NO: 535 - DNA, 38 bp, synthetic construct; identical to SEQ ID NO: 530
  source 1..38: mol_type = other DNA; note = 1240 Primer Fwd

SEQ ID NO: 536 - DNA, 38 bp, synthetic construct; identical to SEQ ID NO: 530
  source 1..38: mol_type = other DNA; note = 1241 Primer Fwd

SEQ ID NO: 537 - DNA, 38 bp, synthetic construct; identical to SEQ ID NO: 530
  source 1..38: mol_type = other DNA; note = 1242 Primer Fwd

SEQ ID NO: 538 - DNA, 38 bp, synthetic construct; identical to SEQ ID NO: 530
  source 1..38: mol_type = other DNA; note = 1243 Primer Fwd

SEQ ID NO: 539 - DNA, 38 bp, synthetic construct; identical to SEQ ID NO: 530
  source 1..38: mol_type = other DNA; note = 1244 Primer Fwd

SEQ ID NO: 540 - DNA, 38 bp, synthetic construct; identical to SEQ ID NO: 530
  source 1..38: mol_type = other DNA; note = 1245 Primer Fwd

SEQ ID NO: 541 - DNA, 38 bp, synthetic construct; identical to SEQ ID NO: 530
  source 1..38: mol_type = other DNA; note = 1246 Primer Fwd

SEQ ID NO: 542 - DNA, 38 bp, synthetic construct
  source 1..38: mol_type = other DNA; note = 1247 Primer Fwd
gctcttccgatctnnnnnggaaaatgccaatgctctgt

SEQ ID NO: 543 - DNA, 38 bp, synthetic construct; identical to SEQ ID NO: 542
  source 1..38: mol_type = other DNA; note = 1248 Primer Fwd

SEQ ID NO: 544 - DNA, 38 bp, synthetic construct; identical to SEQ ID NO: 542
  source 1..38: mol_type = other DNA; note = 1249 Primer Fwd

SEQ ID NO: 545 - DNA, 38 bp, synthetic construct; identical to SEQ ID NO: 542
  source 1..38: mol_type = other DNA; note = 1250 Primer Fwd

SEQ ID NO: 546 - DNA, 38 bp, synthetic construct; identical to SEQ ID NO: 542
  source 1..38: mol_type = other DNA; note = 1251 Primer Fwd

SEQ ID NO: 547 - DNA, 38 bp, synthetic construct; identical to SEQ ID NO: 542
  source 1..38: mol_type = other DNA; note = 1252 Primer Fwd

SEQ ID NO: 548 - DNA, 38 bp, synthetic construct; identical to SEQ ID NO: 542
  source 1..38: mol_type = other DNA; note = 1253 Primer Fwd

SEQ ID NO: 549 - DNA, 38 bp, synthetic construct; identical to SEQ ID NO: 491
  source 1..38: mol_type = other DNA; note = 1254 Primer Fwd

SEQ ID NO: 550 - DNA, 38 bp, synthetic construct; identical to SEQ ID NO: 491
  source 1..38: mol_type = other DNA; note = 1255 Primer Fwd

SEQ ID NO: 551 - DNA, 38 bp, synthetic construct; identical to SEQ ID NO: 490
  source 1..38: mol_type = other DNA; note = 1256 Primer Fwd

SEQ ID NO: 552 - DNA, 38 bp, synthetic construct
  source 1..38: mol_type = other DNA; note = 1257 Primer Fwd
gctcttccgatctnnnnnggcggatcacaagcaataat

SEQ ID NO: 553 - DNA, 38 bp, synthetic construct; identical to SEQ ID NO: 552
  source 1..38: mol_type = other DNA; note = 1258 Primer Fwd

SEQ ID NO: 554 - DNA, 38 bp, synthetic construct; identical to SEQ ID NO: 552
  source 1..38: mol_type = other DNA; note = 1259 Primer Fwd

SEQ ID NO: 555 - DNA, 38 bp, synthetic construct; identical to SEQ ID NO: 552
  source 1..38: mol_type = other DNA; note = 1260 Primer Fwd

SEQ ID NO: 556 - DNA, 38 bp, synthetic construct; identical to SEQ ID NO: 552
  source 1..38: mol_type = other DNA; note = 1261 Primer Fwd

SEQ ID NO: 557 - DNA, 38 bp, synthetic construct; identical to SEQ ID NO: 552
  source 1..38: mol_type = other DNA; note = 1262 Primer Fwd

SEQ ID NO: 558 - DNA, 38 bp, synthetic construct
  source 1..38: mol_type = other DNA; note = 1263 Primer Fwd
gctcttccgatctnnnnntgtgggaagtcttgtccctc

SEQ ID NO: 559 - DNA, 38 bp, synthetic construct
  source 1..38: mol_type = other DNA; note = 1264 Primer Fwd
gctcttccgatctnnnnntaagcctgcccagaagactc

SEQ ID NO: 560 - DNA, 38 bp, synthetic construct
  source 1..38: mol_type = other DNA; note = 1265 Primer Fwd
gctcttccgatctnnnnntccactgcagctcccttact

SEQ ID NO: 561 - DNA, 38 bp, synthetic construct
  source 1..38: mol_type = other DNA; note = 1266 Primer Fwd
gctcttccgatctnnnnnaactcagagcgactttggga

SEQ ID NO: 562 - DNA, 38 bp, synthetic construct
  source 1..38: mol_type = other DNA; note = 1267 Primer Fwd
gctcttccgatctnnnnnactcaagtcggaaacgtgct

SEQ ID NO: 563 - DNA, 38 bp, synthetic construct; identical to SEQ ID NO: 419
  source 1..38: mol_type = other DNA; note = 1077 Primer Rev

SEQ ID NO: 564 - DNA, 38 bp, synthetic construct; identical to SEQ ID NO: 419
  source 1..38: mol_type = other DNA; note = 1078 Primer Rev

SEQ ID NO: 565 - DNA, 38 bp, synthetic construct; identical to SEQ ID NO: 419
  source 1..38: mol_type = other DNA; note = 1079 Primer Rev

SEQ ID NO: 566 - DNA, 39 bp, synthetic construct; identical to SEQ ID NO: 417
  source 1..39: mol_type = other DNA; note = 1080 Primer Rev

SEQ ID NO: 567 - DNA, 39 bp, synthetic construct; identical to SEQ ID NO: 417
  source 1..39: mol_type = other DNA; note = 1081 Primer Rev

SEQ ID NO: 568 - DNA, 39 bp, synthetic construct; identical to SEQ ID NO: 415
  source 1..39: mol_type = other DNA; note = 1082 Primer Rev

SEQ ID NO: 569 - DNA, 39 bp, synthetic construct; identical to SEQ ID NO: 415
  source 1..39: mol_type = other DNA; note = 1083 Primer Rev

SEQ ID NO: 570 - DNA, 39 bp, synthetic construct; identical to SEQ ID NO: 415
  source 1..39: mol_type = other DNA; note = 1084 Primer Rev

SEQ ID NO: 571 - DNA, 39 bp, synthetic construct; identical to SEQ ID NO: 415
  source 1..39: mol_type = other DNA; note = 1085 Primer Rev

SEQ ID NO: 572 - DNA, 39 bp, synthetic construct; identical to SEQ ID NO: 415
  source 1..39: mol_type = other DNA; note = 1086 Primer Rev

SEQ ID NO: 573 - DNA, 39 bp, synthetic construct
  source 1..39: mol_type = other DNA; note = 1087 Primer Rev
gctcttccgatctnnnnntgggctctgattcctacagaa

SEQ ID NO: 574 - DNA, 39 bp, synthetic construct; identical to SEQ ID NO: 573
  source 1..39: mol_type = other DNA; note = 1088 Primer Rev

SEQ ID NO: 575 - DNA, 39 bp, synthetic construct; identical to SEQ ID NO: 573
  source 1..39: mol_type = other DNA; note = 1089 Primer Rev

SEQ ID NO: 576 - DNA, 39 bp, synthetic construct; identical to SEQ ID NO: 573
  source 1..39: mol_type = other DNA; note = 1090 Primer Rev

SEQ ID NO: 577 - DNA, 39 bp, synthetic construct; identical to SEQ ID NO: 573
  source 1..39: mol_type = other DNA; note = 1091 Primer Rev

SEQ ID NO: 578 - DNA, 37 bp, synthetic construct
  source 1..37: mol_type = other DNA; note = 1092 Primer Rev
gctcttccgatctnnnnnctgggcaagggaagaaaaa

SEQ ID NO: 579 - DNA, 38 bp, synthetic construct
  source 1..38: mol_type = other DNA; note = 1093 Primer Rev
gctcttccgatctnnnnnaacctcactcttgtctgggc

SEQ ID NO: 580 - DNA, 38 bp, synthetic construct; identical to SEQ ID NO: 409
  source 1..38: mol_type = other DNA; note = 1094 Primer Rev

SEQ ID NO: 581 - DNA, 38 bp, synthetic construct; identical to SEQ ID NO: 409
  source 1..38: mol_type = other DNA; note = 1095 Primer Rev

SEQ ID NO: 582 - DNA, 38 bp, synthetic construct; identical to SEQ ID NO: 409
  source 1..38: mol_type = other DNA; note = 1096 Primer Rev

SEQ ID NO: 583 - DNA, 38 bp, synthetic construct; identical to SEQ ID NO: 409
  source 1..38: mol_type = other DNA; note = 1097 Primer Rev

SEQ ID NO: 584 - DNA, 38 bp, synthetic construct; identical to SEQ ID NO: 409
  source 1..38: mol_type = other DNA; note = 1098 Primer Rev

SEQ ID NO: 585 - DNA, 38 bp, synthetic construct; identical to SEQ ID NO: 409
  source 1..38: mol_type = other DNA; note = 1099 Primer Rev

SEQ ID NO: 586 - DNA, 38 bp, synthetic construct; identical to SEQ ID NO: 409
  source 1..38: mol_type = other DNA; note = 1100 Primer Rev

SEQ ID NO: 587 - DNA, 38 bp, synthetic construct; identical to SEQ ID NO: 409
  source 1..38: mol_type = other DNA; note = 1101 Primer Rev

SEQ ID NO: 588 - DNA, 38 bp, synthetic construct; identical to SEQ ID NO: 409
  source 1..38: mol_type = other DNA; note = 1102 Primer Rev

SEQ ID NO: 589 - DNA, 38 bp, synthetic construct; identical to SEQ ID NO: 409
  source 1..38: mol_type = other DNA; note = 1103 Primer Rev

SEQ ID NO: 590 - DNA, 38 bp, synthetic construct
  source 1..38: mol_type = other DNA; note = 1104 Primer Rev
gctcttccgatctnnnnncgcagaaaactctacgaggc

SEQ ID NO: 591 - DNA, 38 bp, synthetic construct; identical to SEQ ID NO: 590
  source 1..38: mol_type = other DNA; note = 1105 Primer Rev

SEQ ID NO: 592 - DNA, 38 bp, synthetic construct; identical to SEQ ID NO: 590
  source 1..38: mol_type = other DNA; note = 1106 Primer Rev

SEQ ID NO: 593 - DNA, 38 bp, synthetic construct; identical to SEQ ID NO: 590
  source 1..38: mol_type = other DNA; note = 1107 Primer Rev

SEQ ID NO: 594 - DNA, 38 bp, synthetic construct; identical to SEQ ID NO: 590
  source 1..38: mol_type = other DNA; note = 1108 Primer Rev

SEQ ID NO: 595 - DNA, 38 bp, synthetic construct; identical to SEQ ID NO: 590
  source 1..38: mol_type = other DNA; note = 1109 Primer Rev

SEQ ID NO: 596 - DNA, 38 bp, synthetic construct
  source 1..38: mol_type = other DNA; note = 1110 Primer Rev
gctcttccgatctnnnnnctttccaccaagcaagttcc

SEQ ID NO: 597 - DNA, 38 bp, synthetic construct; identical to SEQ ID NO: 596
  source 1..38: mol_type = other DNA; note = 1111 Primer Rev

SEQ ID NO: 598 - DNA, 38 bp, synthetic construct; identical to SEQ ID NO: 596
  source 1..38: mol_type = other DNA; note = 1112 Primer Rev

SEQ ID NO: 599 - DNA, 38 bp, synthetic construct; identical to SEQ ID NO: 596
  source 1..38: mol_type = other DNA; note = 1113 Primer Rev

SEQ ID NO: 600 - DNA, 38 bp, synthetic construct; identical to SEQ ID NO: 390
  source 1..38: mol_type = other DNA; note = 1114 Primer Rev

SEQ ID NO: 601 - DNA, 38 bp, synthetic construct; identical to SEQ ID NO: 390
  source 1..38: mol_type = other DNA; note = 1115 Primer Rev

SEQ ID NO: 602 - DNA, 38 bp, synthetic construct; identical to SEQ ID NO: 390
  source 1..38: mol_type = other DNA; note = 1116 Primer Rev

SEQ ID NO: 603 - DNA, 38 bp, synthetic construct; identical to SEQ ID NO: 390
  source 1..38: mol_type = other DNA; note = 1117 Primer Rev

SEQ ID NO: 604 - DNA, 38 bp, synthetic construct; identical to SEQ ID NO: 390
  source 1..38: mol_type = other DNA; note = 1118 Primer Rev

SEQ ID NO: 605 - DNA, 38 bp, synthetic construct; identical to SEQ ID NO: 385
  source 1..38: mol_type = other DNA; note = 1119 Primer Rev

SEQ ID NO: 606 - DNA, 38 bp, synthetic construct; identical to SEQ ID NO: 375
  source 1..38: mol_type = other DNA; note = 1120 Primer Rev

SEQ ID NO: 607 - DNA, 38 bp, synthetic construct; identical to SEQ ID NO: 375
  source 1..38: mol_type = other DNA; note = 1121 Primer Rev

SEQ ID NO: 608 - DNA, 38 bp, synthetic construct; identical to SEQ ID NO: 375
  source 1..38: mol_type = other DNA; note = 1122 Primer Rev

SEQ ID NO: 609 - DNA, 38 bp, synthetic construct; identical to SEQ ID NO: 375
  source 1..38: mol_type = other DNA; note = 1123 Primer Rev

SEQ ID NO: 610 - DNA, 38 bp, synthetic construct; identical to SEQ ID NO: 372
  source 1..38: mol_type = other DNA; note = 1124 Primer Rev

SEQ ID NO: 611 - DNA, 38 bp, synthetic construct; identical to SEQ ID NO: 372
  source 1..38: mol_type = other DNA; note = 1125 Primer Rev

SEQ ID NO: 612 - DNA, 38 bp, synthetic construct; identical to SEQ ID NO: 372
  source 1..38: mol_type = other DNA; note = 1126 Primer Rev

SEQ ID NO: 613 - DNA, 38 bp, synthetic construct; identical to SEQ ID NO: 372
  source 1..38: mol_type = other DNA; note = 1127 Primer Rev

SEQ ID NO: 614 - DNA, 38 bp, synthetic construct; identical to SEQ ID NO: 372
  source 1..38: mol_type = other DNA; note = 1128 Primer Rev

SEQ ID NO: 615 - DNA, 38 bp, synthetic construct; identical to SEQ ID NO: 372
  source 1..38: mol_type = other DNA; note = 1129 Primer Rev

SEQ ID NO: 616 - DNA, 38 bp, synthetic construct; identical to SEQ ID NO: 372
  source 1..38: mol_type = other DNA; note = 1130 Primer Rev

SEQ ID NO: 617 - DNA, 38 bp, synthetic construct; identical to SEQ ID NO: 372
  source 1..38: mol_type = other DNA; note = 1131 Primer Rev

SEQ ID NO: 618 - DNA, 38 bp, synthetic construct; identical to SEQ ID NO: 372
  source 1..38: mol_type = other DNA; note = 1132 Primer Rev

SEQ ID NO: 619 - DNA, 38 bp, synthetic construct; identical to SEQ ID NO: 372
  source 1..38: mol_type = other DNA; note = 1133 Primer Rev

SEQ ID NO: 620 - DNA, 38 bp, synthetic construct; identical to SEQ ID NO: 372
  source 1..38: mol_type = other DNA; note = 1134 Primer Rev

SEQ ID NO: 621 - DNA, 38 bp, synthetic construct
  source 1..38: mol_type = other DNA; note = 1135 Primer Rev
gctcttccgatctnnnnntgctaatttccctccgtttg

SEQ ID NO: 622 - DNA, 38 bp, synthetic construct; identical to SEQ ID NO: 621
  source 1..38: mol_type = other DNA; note = 1136 Primer Rev

SEQ ID NO: 623 - DNA, 38 bp, synthetic construct
  source 1..38: mol_type = other DNA; note = 1137 Primer Rev
gctcttccgatctnnnnntggcagccaatgaaatacaa

SEQ ID NO: 624 - DNA, 40 bp, synthetic construct
  source 1..40: mol_type = other DNA; note = 1138 Primer Rev
gctcttccgatctnnnnnttgtggagaaaacagttccaga

SEQ ID NO: 625 - DNA, 38 bp, synthetic construct
  source 1..38: mol_type = other DNA; note = 1139 Primer Rev
gctcttccgatctnnnnncagctcaggttctgggagag

SEQ ID NO: 626 - DNA, 38 bp, synthetic construct
  source 1..38: mol_type = other DNA; note = 1140 Primer Rev
gctcttccgatctnnnnncagcaccaggatcagtgaaa

SEQ ID NO: 627 - DNA, 40 bp, synthetic construct
  source 1..40: mol_type = other DNA; note = 1141 Primer Rev
gctcttccgatctnnnnntctgtgcattcaaactcaagat

SEQ ID NO: 628 - DNA, 40 bp, synthetic construct; identical to SEQ ID NO: 627
  source 1..40: mol_type = other DNA; note = 1142 Primer Rev

SEQ ID NO: 629 - DNA, 38 bp, synthetic construct; identical to SEQ ID NO: 461
  source 1..38: mol_type = other DNA; note = 1143 Primer Rev

SEQ ID NO: 630 - DNA, 38 bp, synthetic construct; identical to SEQ ID NO: 461
  source 1..38: mol_type = other DNA; note = 1144 Primer Rev

SEQ ID NO: 631 - DNA, 38 bp, synthetic construct; identical to SEQ ID NO: 461
  source 1..38: mol_type = other DNA; note = 1145 Primer Rev

SEQ ID NO: 632 - DNA, 38 bp, synthetic construct; identical to SEQ ID NO: 461
  source 1..38: mol_type = other DNA; note = 1146 Primer Rev

SEQ ID NO: 633 - DNA, 38 bp, synthetic construct; identical to SEQ ID NO: 458
  source 1..38: mol_type = other DNA; note = 1147 Primer Rev

SEQ ID NO: 634 - DNA, 38 bp, synthetic construct; identical to SEQ ID NO: 458
  source 1..38: mol_type = other DNA; note = 1148 Primer Rev

SEQ ID NO: 635 - DNA, 38 bp, synthetic construct; identical to SEQ ID NO: 458
  source 1..38: mol_type = other DNA; note = 1149 Primer Rev

SEQ ID NO: 636 - DNA, 38 bp, synthetic construct; identical to SEQ ID NO: 458
  source 1..38: mol_type = other DNA; note = 1150 Primer Rev

SEQ ID NO: 637 - DNA, 38 bp, synthetic construct; identical to SEQ ID NO: 458
  source 1..38: mol_type = other DNA; note = 1151 Primer Rev

SEQ ID NO: 638 - DNA, 38 bp, synthetic construct; identical to SEQ ID NO: 458
  source 1..38: mol_type = other DNA; note = 1152 Primer Rev

SEQ ID NO: 639 - DNA, 38 bp, synthetic construct; identical to SEQ ID NO: 458
  source 1..38: mol_type = other DNA; note = 1153 Primer Rev

SEQ ID NO: 640 - DNA, 38 bp, synthetic construct; identical to SEQ ID NO: 458
  source 1..38: mol_type = other DNA; note = 1154 Primer Rev

SEQ ID NO: 641 - DNA, 38 bp, synthetic construct; identical to SEQ ID NO: 458
  source 1..38: mol_type = other DNA; note = 1155 Primer Rev

SEQ ID NO: 642 - DNA, 38 bp, synthetic construct
  source 1..38: mol_type = other DNA; note = 1156 Primer Rev
gctcttccgatctnnnnnccacattgctcagcacagat

SEQ ID NO: 643 - DNA, 38 bp, synthetic construct; identical to SEQ ID NO: 642
  source 1..38: mol_type = other DNA; note = 1157 Primer Rev

SEQ ID NO: 644 - DNA, 38 bp, synthetic construct; identical to SEQ ID NO: 642
  source 1..38: mol_type = other DNA; note = 1158 Primer Rev

SEQ ID NO: 645 - DNA, 38 bp, synthetic construct; identical to SEQ ID NO: 642
  source 1..38: mol_type = other DNA; note = 1159 Primer Rev

SEQ ID NO: 646 - DNA, 38 bp, synthetic construct; identical to SEQ ID NO: 642
  source 1..38: mol_type = other DNA; note = 1160 Primer Rev

SEQ ID NO: 647 - DNA, 38 bp, synthetic construct; identical to SEQ ID NO: 642
  source 1..38: mol_type = other DNA; note = 1161 Primer Rev

SEQ ID NO: 648 - DNA, 38 bp, synthetic construct; identical to SEQ ID NO: 642
  source 1..38: mol_type = other DNA; note = 1162 Primer Rev

SEQ ID NO: 649 - DNA, 38 bp, synthetic construct; identical to SEQ ID NO: 442
  source 1..38: mol_type = other DNA; note = 1163 Primer Rev

SEQ ID NO: 650 - DNA, 38 bp, synthetic construct; identical to SEQ ID NO: 442
  source 1..38: mol_type = other DNA; note = 1164 Primer Rev

SEQ ID NO: 651 - DNA, 38 bp, synthetic construct; identical to SEQ ID NO: 442
  source 1..38: mol_type = other DNA; note = 1165 Primer Rev

SEQ ID NO: 652 - DNA, 39 bp, synthetic construct; identical to SEQ ID NO: 441
  source 1..39: mol_type = other DNA; note = 1166 Primer Rev

SEQ ID NO: 653 - DNA, 39 bp, synthetic construct; identical to SEQ ID NO: 441
  source 1..39: mol_type = other DNA; note = 1167 Primer Rev

SEQ ID NO: 654 - DNA, 39 bp, synthetic construct; identical to SEQ ID NO: 441
  source 1..39: mol_type = other DNA; note = 1168 Primer Rev

SEQ ID NO: 655 - DNA, 39 bp, synthetic construct; identical to SEQ ID NO: 441
  source 1..39: mol_type = other DNA; note = 1169 Primer Rev

SEQ ID NO: 656 - DNA, 40 bp, synthetic construct; identical to SEQ ID NO: 439
  source 1..40: mol_type = other DNA; note = 1170 Primer Rev

SEQ ID NO: 657 - DNA, 40 bp, synthetic construct; identical to SEQ ID NO: 439
  source 1..40: mol_type = other DNA; note = 1171 Primer Rev

SEQ ID NO: 658 - DNA, 40 bp, synthetic construct; identical to SEQ ID NO: 439
  source 1..40: mol_type = other DNA; note = 1172 Primer Rev

SEQ ID NO: 659 - DNA, 40 bp, synthetic construct; identical to SEQ ID NO: 439
  source 1..40: mol_type = other DNA; note = 1173 Primer Rev

SEQ ID NO: 660 - DNA, 40 bp, synthetic construct; identical to SEQ ID NO: 439
  source 1..40: mol_type = other DNA; note = 1174 Primer Rev

SEQ ID NO: 661 - DNA, 41 bp, synthetic construct; identical to SEQ ID NO: 438
  source 1..41: mol_type = other DNA; note = 1175 Primer Rev

SEQ ID NO: 662 - DNA, 41 bp, synthetic construct
  source 1..41: mol_type = other DNA; note = 1176 Primer Rev
gctcttccgatctnnnnntttttctagtaatggaagcctgg

SEQ ID NO: 663 - DNA, 38 bp, synthetic construct
  source 1..38: mol_type = other DNA; note = 1177 Primer Rev
gctcttccgatctnnnnncacctttcctatcaacccca

SEQ ID NO: 664 - DNA, 38 bp, synthetic construct; identical to SEQ ID NO: 663
  source 1..38: mol_type = other DNA; note = 1178 Primer Rev

SEQ ID NO: 665 - DNA, 38 bp, synthetic construct
  source 1..38: mol_type = other DNA; note = 1179 Primer Rev
gctcttccgatctnnnnngaaccaatgaaatgcgaggt

SEQ ID NO: 666 - DNA, 38 bp, synthetic construct; identical to SEQ ID NO: 665
  source 1..38: mol_type = other DNA; note = 1180 Primer Rev

SEQ ID NO: 667 - DNA, 38 bp, synthetic construct; identical to SEQ ID NO: 665
  source 1..38: mol_type = other DNA; note = 1181 Primer Rev

SEQ ID NO: 668 - DNA, 38 bp, synthetic construct; identical to SEQ ID NO: 665
  source 1..38: mol_type = other DNA; note = 1182 Primer Rev

SEQ ID NO: 669 - DNA, 38 bp, synthetic construct; identical to SEQ ID NO: 560
  source 1..38: mol_type = other DNA; note = 1183 Primer Rev

SEQ ID NO: 670 - DNA, 38 bp, synthetic construct; identical to SEQ ID NO: 560
  source 1..38: mol_type = other DNA; note = 1184 Primer Rev

SEQ ID NO: 671 - DNA, 38 bp, synthetic construct; identical to SEQ ID NO: 560
  source 1..38: mol_type = other DNA; note = 1185 Primer Rev

SEQ ID NO: 672 - DNA, 38 bp, synthetic construct; identical to SEQ ID NO: 560
  source 1..38: mol_type = other DNA; note = 1186 Primer Rev

SEQ ID NO: 673 - DNA, 38 bp, synthetic construct; identical to SEQ ID NO: 560
  source 1..38: mol_type = other DNA; note = 1187 Primer Rev

SEQ ID NO: 674 - DNA, 38 bp, synthetic construct; identical to SEQ ID NO: 559
  source 1..38: mol_type = other DNA; note = 1188 Primer Rev

SEQ ID NO: 675 - DNA, 38 bp, synthetic construct; identical to SEQ ID NO: 559
  source 1..38: mol_type = other DNA; note = 1189 Primer Rev

SEQ ID NO: 676 - DNA, 38 bp, synthetic construct; identical to SEQ ID NO: 558
  source 1..38: mol_type = other DNA; note = 1190 Primer Rev

SEQ ID NO: 677 - DNA, 38 bp, synthetic construct; identical to SEQ ID NO: 558
  source 1..38: mol_type = other DNA; note = 1191 Primer Rev

SEQ ID NO: 678 - DNA, 38 bp, synthetic construct; identical to SEQ ID NO: 558
  source 1..38: mol_type = other DNA; note = 1192 Primer Rev

SEQ ID NO: 679 - DNA, 38 bp, synthetic construct; identical to SEQ ID NO: 558
  source 1..38: mol_type = other DNA; note = 1193 Primer Rev

SEQ ID NO: 680 - DNA, 38 bp, synthetic construct; identical to SEQ ID NO: 558
  source 1..38: mol_type = other DNA; note = 1194 Primer Rev

SEQ ID NO: 681 - DNA, 38 bp, synthetic construct; identical to SEQ ID NO: 552
  source 1..38: mol_type = other DNA; note = 1195 Primer Rev

SEQ ID NO: 682 - DNA, 38 bp, synthetic construct; identical to SEQ ID NO: 500
  source 1..38: mol_type = other DNA; note = 1196 Primer Rev

SEQ ID NO: 683 - DNA, 38 bp, synthetic construct; identical to SEQ ID NO: 552
  source 1..38: mol_type = other DNA; note = 1197 Primer Rev

SEQ ID NO: 684 - DNA, 38 bp, synthetic construct; identical to SEQ ID NO: 552
  source 1..38: mol_type = other DNA; note = 1198 Primer Rev

SEQ ID NO: 685 - DNA, 38 bp, synthetic construct; identical to SEQ ID NO: 552
  source 1..38: mol_type = other DNA; note = 1199 Primer Rev

SEQ ID NO: 686 - DNA, 38 bp, synthetic construct; identical to SEQ ID NO: 552
  source 1..38: mol_type = other DNA; note = 1200 Primer Rev

SEQ ID NO: 687 - DNA, 38 bp, synthetic construct; identical to SEQ ID NO: 552
  source 1..38: mol_type = other DNA; note = 1201 Primer Rev

SEQ ID NO: 688 - DNA, 38 bp, synthetic construct; identical to SEQ ID NO: 552
  source 1..38: mol_type = other DNA; note = 1202 Primer Rev

SEQ ID NO: 689 - DNA, 38 bp, synthetic construct; identical to SEQ ID NO: 552
  source 1..38: mol_type = other DNA; note = 1203 Primer Rev

SEQ ID NO: 690 - DNA, 38 bp, synthetic construct; identical to SEQ ID NO: 552
  source 1..38: mol_type = other DNA; note = 1204 Primer Rev

SEQ ID NO: 691 - DNA, 38 bp, synthetic construct; identical to SEQ ID NO: 491
  source 1..38: mol_type = other DNA; note = 1205 Primer Rev

SEQ ID NO: 692 - DNA, 38 bp, synthetic construct; identical to SEQ ID NO: 491
  source 1..38: mol_type = other DNA; note = 1206 Primer Rev

SEQ ID NO: 693 - DNA, 38 bp, synthetic construct
  source 1..38: mol_type = other DNA; note = 1207 Primer Rev
gctcttccgatctnnnnngcgggagaaatggatatgaa

SEQ ID NO: 694 - DNA, 38 bp, synthetic construct; identical to SEQ ID NO: 542
  source 1..38: mol_type = other DNA; note = 1208 Primer Rev

SEQ ID NO: 695 - DNA, 38 bp, synthetic construct; identical to SEQ ID NO: 542
  source 1..38: mol_type = other DNA; note = 1209 Primer Rev

SEQ ID NO: 696 - DNA, 38 bp, synthetic construct; identical to SEQ ID NO: 542
  source 1..38: mol_type = other DNA; note = 1210 Primer Rev

SEQ ID NO: 697 - DNA, 38 bp, synthetic construct; identical to SEQ ID NO: 542
  source 1..38: mol_type = other DNA; note = 1211 Primer Rev

SEQ ID NO: 698 - DNA, 38 bp, synthetic construct; identical to SEQ ID NO: 542
  source 1..38: mol_type = other DNA; note = 1212 Primer Rev

SEQ ID NO: 699 - DNA, 38 bp, synthetic construct; identical to SEQ ID NO: 542
  source 1..38: mol_type = other DNA; note = 1213 Primer Rev

SEQ ID NO: 700 - DNA, 38 bp, synthetic construct; identical to SEQ ID NO: 542
  source 1..38: mol_type = other DNA; note = 1214 Primer Rev

SEQ ID NO: 701 - DNA, 38 bp, synthetic construct; identical to SEQ ID NO: 542
  source 1..38: mol_type = other DNA; note = 1215 Primer Rev

SEQ ID NO: 702 - DNA, 38 bp, synthetic construct; identical to SEQ ID NO: 542
  source 1..38: mol_type = other DNA; note = 1216 Primer Rev

SEQ ID NO: 703 - DNA, 38 bp, synthetic construct; identical to SEQ ID NO: 542
  source 1..38: mol_type = other DNA; note = 1217 Primer Rev

SEQ ID NO: 704 - DNA, 38 bp, synthetic construct; identical to SEQ ID NO: 542
  source 1..38: mol_type = other DNA; note = 1218 Primer Rev

SEQ ID NO: 705 - DNA, 38 bp, synthetic construct; identical to SEQ ID NO: 542
  source 1..38: mol_type = other DNA; note = 1219 Primer Rev

SEQ ID NO: 706 - DNA, 38 bp, synthetic construct; identical to SEQ ID NO: 542
  source 1..38: mol_type = other DNA; note = 1220 Primer Rev

SEQ ID NO: 707 - DNA, 38 bp, synthetic construct; identical to SEQ ID NO: 530
  source 1..38: mol_type = other DNA; note = 1221 Primer Rev

SEQ ID NO: 708 - DNA, 38 bp, synthetic construct; identical to SEQ ID NO: 530
  source 1..38: mol_type = other DNA; note = 1222 Primer Rev

SEQ ID NO: 709 - DNA, 38 bp, synthetic construct; identical to SEQ ID NO: 530
  source 1..38: mol_type = other DNA; note = 1223 Primer Rev

SEQ ID NO: 710 - DNA, 38 bp, synthetic construct; identical to SEQ ID NO: 530
  source 1..38: mol_type = other DNA; note = 1224 Primer Rev

SEQ ID NO: 711 - DNA, 38 bp, synthetic construct; identical to SEQ ID NO: 530
  source 1..38: mol_type = other DNA; note = 1225 Primer Rev

SEQ ID NO: 712 - DNA, 38 bp, synthetic construct; identical to SEQ ID NO: 530
  source 1..38: mol_type = other DNA; note = 1226 Primer Rev

SEQ ID NO: 713 - DNA, 38 bp, synthetic construct; identical to SEQ ID NO: 530
  source 1..38: mol_type = other DNA; note = 1227 Primer Rev

SEQ ID NO: 714 - DNA, 38 bp, synthetic construct; identical to SEQ ID NO: 530
  source 1..38: mol_type = other DNA; note = 1228 Primer Rev

SEQ ID NO: 715 - DNA, 38 bp, synthetic construct; identical to SEQ ID NO: 530
  source 1..38: mol_type = other DNA; note = 1229 Primer Rev

SEQ ID NO: 716 - DNA, 38 bp, synthetic construct; identical to SEQ ID NO: 530
  source 1..38: mol_type = other DNA; note = 1230 Primer Rev

SEQ ID NO: 717 - DNA, 38 bp, synthetic construct
  source 1..38: mol_type = other DNA; note = 1231 Primer Rev
gctcttccgatctnnnnncaaatgtggaacaccacctg

SEQ ID NO: 718 - DNA, 38 bp, synthetic construct
  source 1..38: mol_type = other DNA; note = 1232 Primer Rev
gctcttccgatctnnnnntttgcattccaaaaggaacc

SEQ ID NO: 719 - DNA, 38 bp, synthetic construct; identical to SEQ ID NO: 718
  source 1..38: mol_type = other DNA; note = 1233 Primer Rev

SEQ ID NO: 720 - DNA, 38 bp, synthetic construct; identical to SEQ ID NO: 718
  source 1..38: mol_type = other DNA; note = 1234 Primer Rev

SEQ ID NO: 721 - DNA, 38 bp, synthetic construct; identical to SEQ ID NO: 516
  source 1..38: mol_type = other DNA; note = 1235 Primer Rev

SEQ ID NO: 722 - DNA, 38 bp, synthetic construct; identical to SEQ ID NO: 516
  source 1..38: mol_type = other DNA; note = 1236 Primer Rev

SEQ ID NO: 723 - DNA, 38 bp, synthetic construct; identical to SEQ ID NO: 516
  source 1..38: mol_type = other DNA; note = 1237 Primer Rev

SEQ ID NO: 724 - DNA, 38 bp, synthetic construct; identical to SEQ ID NO: 516
  source 1..38: mol_type = other DNA; note = 1238 Primer Rev

SEQ ID NO: 725 - DNA, 38 bp, synthetic construct; identical to SEQ ID NO: 516
  source 1..38: mol_type = other DNA; note = 1239 Primer Rev

SEQ ID NO: 726 - DNA, 38 bp, synthetic construct; identical to SEQ ID NO: 516
  source 1..38: mol_type = other DNA; note = 1240 Primer Rev

SEQ ID NO: 727 - DNA, 38 bp, synthetic construct; identical to SEQ ID NO: 516
  source 1..38: mol_type = other DNA; note = 1241 Primer Rev

SEQ ID NO: 728 - DNA, 38 bp, synthetic construct; identical to SEQ ID NO: 516
  source 1..38: mol_type = other DNA; note = 1242 Primer Rev

SEQ ID NO: 729 - DNA, 38 bp, synthetic construct; identical to SEQ ID NO: 516
  source 1..38: mol_type = other DNA; note = 1243 Primer Rev

SEQ ID NO: 730 - DNA, 38 bp, synthetic construct; identical to SEQ ID NO: 516
  source 1..38: mol_type = other DNA; note = 1244 Primer Rev

SEQ ID NO: 731 - DNA, 38 bp, synthetic construct; identical to SEQ ID NO: 516
  source 1..38: mol_type = other DNA; note = 1245 Primer Rev

SEQ ID NO: 732 - DNA, 38 bp, synthetic construct; identical to SEQ ID NO: 516
  source 1..38: mol_type = other DNA; note = 1246 Primer Rev

SEQ ID NO: 733 - DNA, 38 bp, synthetic construct; identical to SEQ ID NO: 502
  source 1..38: mol_type = other DNA; note = 1247 Primer Rev

SEQ ID NO: 734 - DNA, 38 bp, synthetic construct; identical to SEQ ID NO: 502
  source 1..38: mol_type = other DNA; note = 1248 Primer Rev

SEQ ID NO: 735 - DNA, 38 bp, synthetic construct; identical to SEQ ID NO: 502
  source 1..38: mol_type = other DNA; note = 1249 Primer Rev

SEQ ID NO: 736 - DNA, 38 bp, synthetic construct; identical to SEQ ID NO: 502
  source 1..38: mol_type = other DNA; note = 1250 Primer Rev

SEQ ID NO: 737 - DNA, 38 bp, synthetic construct; identical to SEQ ID NO: 502
  source 1..38: mol_type = other DNA; note = 1251 Primer Rev

SEQ ID NO: 738 - DNA, 38 bp, synthetic construct; identical to SEQ ID NO: 502
  source 1..38: mol_type = other DNA; note = 1252 Primer Rev

SEQ ID NO: 739 - DNA, 38 bp, synthetic construct; identical to SEQ ID NO: 502
  source 1..38: mol_type = other DNA; note = 1253 Primer Rev

SEQ ID NO: 740 - DNA, 38 bp, synthetic construct
  source 1..38: mol_type = other DNA; note = 1254 Primer Rev
gctcttccgatctnnnnnaagggagctgcagtggagta

SEQ ID NO: 741 - DNA, 38 bp, synthetic construct; identical to SEQ ID NO: 500
  source 1..38: mol_type = other DNA; note = 1255 Primer Rev

SEQ ID NO: 742 - DNA, 38 bp, synthetic construct; identical to SEQ ID NO: 552
  source 1..38: mol_type = other DNA; note = 1256 Primer Rev

SEQ ID NO: 743 - DNA, 38 bp, synthetic construct; identical to SEQ ID NO: 490
  source 1..38: mol_type = other DNA; note = 1257 Primer Rev

SEQ ID NO: 744 - DNA, 38 bp, synthetic construct; identical to SEQ ID NO: 490
  source 1..38: mol_type = other DNA; note = 1258 Primer Rev

SEQ ID NO: 745 - DNA, 38 bp, synthetic construct; identical to SEQ ID NO: 490
  source 1..38: mol_type = other DNA; note = 1259 Primer Rev

SEQ ID NO: 746 - DNA, 38 bp, synthetic construct; identical to SEQ ID NO: 490
  source 1..38: mol_type = other DNA; note = 1260 Primer Rev

SEQ ID NO: 747 - DNA, 38 bp, synthetic construct; identical to SEQ ID NO: 490
  source 1..38: mol_type = other DNA; note = 1261 Primer Rev

SEQ ID NO: 748 - DNA, 38 bp, synthetic construct; identical to SEQ ID NO: 490
  source 1..38: mol_type = other DNA; note = 1262 Primer Rev

SEQ ID NO: 749 - DNA, 38 bp, synthetic construct; identical to SEQ ID NO: 485
  source 1..38: mol_type = other DNA; note = 1263 Primer Rev

SEQ ID NO: 750 - DNA, 38 bp, synthetic construct; identical to SEQ ID NO: 483
  source 1..38: mol_type = other DNA; note = 1264 Primer Rev

SEQ ID NO: 751 - DNA, 38 bp, synthetic construct; identical to SEQ ID NO: 478
  source 1..38: mol_type = other DNA; note = 1265 Primer Rev

SEQ ID NO: 752 - DNA, 38 bp, synthetic construct
  source 1..38: mol_type = other DNA; note = 1266 Primer Rev
gctcttccgatctnnnnngggagggtcagcgaaagtag

SEQ ID NO: 753 - DNA, 38 bp, synthetic construct
  source 1..38: mol_type = other DNA; note = 1267 Primer Rev
gctcttccgatctnnnnntgaaaacacaaatggcgtgt

SEQ ID NO: 754 - DNA, 24 bp, Homo sapiens
  source 1..24: mol_type = other DNA; note = 1077 Target
agaaatccatttttctattgttca

SEQ ID NO: 755 - DNA, 24 bp, Homo sapiens
  source 1..24: mol_type = other DNA; note = 1078 Target
caacttttattctattttcccagt

SEQ ID NO: 756 - DNA, 24 bp, Homo sapiens
  source 1..24: mol_type = other DNA; note = 1079 Target
aaataaagttttagtaaactctgc

SEQ ID NO: 757 - DNA, 24 bp, Homo sapiens
  source 1..24: mol_type = other DNA; note = 1080 Target
ttagtaaactctgcatctttaaag

SEQ ID NO: 758 - DNA, 24 bp, Homo sapiens
  source 1..24: mol_type = other DNA; note = 1081 Target
aactctgcatctttaaagaattat

SEQ ID NO: 759 - DNA, 24 bp, Homo sapiens
  source 1..24: mol_type = other DNA; note = 1082 Target
ttttgtatttgtgaagtcttacaa

SEQ ID NO: 760 - DNA, 24 bp, Homo sapiens
  source 1..24: mol_type = other DNA; note = 1083 Target
tttgtgaagtcttacaaggttatc

SEQ ID NO: 761 - DNA, 24 bp, Homo sapiens
  source 1..24: mol_type = other DNA; note = 1084 Target
aagtcttacaaggttatcttatta

SEQ ID NO: 762 - DNA, 24 bp, Homo sapiens
  source 1..24: mol_type = other DNA; note = 1085 Target
ttacaaggttatcttattaataaa

SEQ ID NO: 763 - DNA, 24 bp, Homo sapiens
  source 1..24: mol_type = other DNA; note = 1086 Target
atcttattaataaaattcaaacat

SEQ ID NO: 764 - DNA, 24 bp, Homo sapiens
  source 1..24: mol_type = other DNA; note = 1087 Target
aaaaaaaaaaaaggtcagaattgt

SEQ ID NO: 765 - DNA, 24 bp, Homo sapiens
  source 1..24: mol_type = other DNA; note = 1088 Target
agaattgtttagtgactgtaattt

SEQ ID NO: 766 - DNA, 24 bp, Homo sapiens
  source 1..24: mol_type = other DNA; note = 1089 Target
tagtgactgtaattttcttttgcg

SEQ ID NO: 767 - DNA, 24 bp, Homo sapiens
  source 1..24: mol_type = other DNA; note = 1090 Target
actgtaattttcttttgcgcacta

SEQ ID NO: 768 - DNA, 24 bp, Homo sapiens
  source 1..24: mol_type = other DNA; note = 1091 Target
attttcttttgcgcactaaggaaa

SEQ ID NO: 769 - DNA, 24 bp, Homo sapiens
  source 1..24: mol_type = other DNA; note = 1092 Target
caaagtaacttagagtgactgaaa

SEQ ID NO: 770 - DNA, 24 bp, Homo sapiens
  source 1..24: mol_type = other DNA; note = 1093 Target
acttagagtgactgaaacttcaca

SEQ ID NO: 771 - DNA, 24 bp, Homo sapiens
  source 1..24: mol_type = other DNA; note = 1094 Target
actgaaacttcacagaatagggtt

SEQ ID NO: 772 - DNA, 24 bp, Homo sapiens
  source 1..24: mol_type = other DNA; note = 1095 Target
gaagattgaattcataactatccc

SEQ ID NO: 773 - DNA, 24 bp, Homo sapiens
  source 1..24: mol_type = other DNA; note = 1096 Target
ctgttgatctcataaatagaactt

SEQ ID NO: 774 - DNA, 24 bp, Homo sapiens
  source 1..24: mol_type = other DNA; note = 1097 Target
gatctcataaatagaacttgtatt

SEQ ID NO: 775 - DNA, 24 bp, Homo sapiens
  source 1..24: mol_type = other DNA; note = 1098 Target
tttatatttattttcattttagtc

SEQ ID NO: 776 - DNA, 24 bp, Homo sapiens
  source 1..24: mol_type = other DNA; note = 1099 Target
tgtcttcttggttgctgttgatag

SEQ ID NO: 777 - DNA, 24 bp, Homo sapiens
  source 1..24: mol_type = other DNA; note = 1100 Target
ttcttggttgctgttgatagacac

SEQ ID NO: 778 - DNA, 24 bp, Homo sapiens
  source 1..24: mol_type = other DNA; note = 1101 Target
gctgttgatagacactaaaagagt

SEQ ID NO: 779 - DNA, 24 bp, Homo sapiens
  source 1..24: mol_type = other DNA; note = 1102 Target
gatagacactaaaagagtattaga

SEQ ID NO: 780 - DNA, 24 bp, Homo sapiens
  source 1..24: mol_type = other DNA; note = 1103 Target
ttagatattatctaagtttgaata

SEQ ID NO: 781 - DNA, 24 bp, Homo sapiens
  source 1..24: mol_type = other DNA; note = 1104 Target
tgaatataaggctataaatattta

SEQ ID NO: 782 - DNA, 24 bp, Homo sapiens
  source 1..24: mol_type = other DNA; note = 1105 Target
ttcttggtaattgaattattcttc

SEQ ID NO: 783 - DNA, 24 bp, Homo sapiens
  source 1..24: mol_type = other DNA; note = 1106 Target
attgaattattcttctgtttaaag

SEQ ID NO: 784 - DNA, 24 bp, Homo sapiens
  source 1..24: mol_type = other DNA; note = 1107 Target
taaaggcagaagaaataattgaac

SEQ ID NO: 785 - DNA, 24 bp, Homo sapiens
  source 1..24: mol_type = other DNA; note = 1108 Target
tttctgtaggaatcagagcccaat

SEQ ID NO: 786 - DNA, 24 bp, Homo sapiens
  source 1..24: mol_type = other DNA; note = 1109 Target
ggaatcagagcccaatattttgaa

SEQ ID NO: 787 - DNA, 24 bp, Homo sapiens
  source 1..24: mol_type = other DNA; note = 1110 Target
aaatggaaagaaatataaaaagta

SEQ ID NO: 788 - DNA, 24 bp, Homo sapiens
  source 1..24: mol_type = other DNA; note = 1111 Target
acattattacttcttgttttcttc

SEQ ID NO: 789 - DNA, 24 bp, Homo sapiens
  source 1..24: mol_type = other DNA; note = 1112 Target
ttcttcagtatttaacaatccttt

SEQ ID NO: 790 - DNA, 24 bp, Homo sapiens
  source 1..24: mol_type = other DNA; note = 1113 Target
tttaacaatccttttttttcttcc

SEQ ID NO: 791 - DNA, 24 bp, Homo sapiens
  source 1..24: mol_type = other DNA; note = 1114 Target
tgggcaagggaagaaaaaaaagga

SEQ ID NO: 792 - DNA, 24 bp, Homo sapiens
  source 1..24: mol_type = other DNA; note = 1115 Target
aaatactgaagaaaacaagaagta

SEQ ID NO: 793 - DNA, 24 bp, Homo sapiens
  source 1..24: mol_type = other DNA; note = 1116 Target
ataatgttactttttatatttctt

SEQ ID NO: 794 - DNA, 24 bp, Homo sapiens
  source 1..24: mol_type = other DNA; note = 1117 Target
actttttatatttctttccatttg

SEQ ID NO: 795 - DNA, 24 bp, Homo sapiens
  source 1..24: mol_type = other DNA; note = 1118 Target
tcaaaatattgggctctgattcct

SEQ ID NO: 796 - DNA, 24 bp, Homo sapiens
  source 1..24: mol_type = other DNA; note = 1119 Target
caattatttcttctgcctttaaac

SEQ ID NO: 797 - DNA, 24 bp, Homo sapiens
  source 1..24: mol_type = other DNA; note = 1120 Target
tctatcaacagcaaccaagaagac

SEQ ID NO: 798 - DNA, 24 bp, Homo sapiens
  source 1..24: mol_type = other DNA; note = 1121 Target
tatcaacagcaaccaagaagacag

SEQ ID NO: 799 - DNA, 24 bp, Homo sapiens
  source 1..24: mol_type = other DNA; note = 1122 Target
ctatttatgagatcaacagcacag

SEQ ID NO: 800 - DNA, 24 bp, Homo sapiens
  source 1..24: mol_type = other DNA; note = 1123 Target
ttgtggtttttaaataaagcatag

SEQ ID NO: 801 - DNA, 24 bp, Homo sapiens
  source 1..24: mol_type = other DNA; note = 1124 Target
gtttttaaataaagcatagtgcaa

SEQ ID NO: 802 - DNA, 24 bp, Homo sapiens
  source 1..24: mol_type = other DNA; note = 1125 Target
tttaaataaagcatagtgcaatgg

SEQ ID NO: 803 - DNA, 24 bp, Homo sapiens
  source 1..24: mol_type = other DNA; note = 1126 Target
caatggataggtctttgggatagt

SEQ ID NO: 804 - DNA, 24 bp, Homo sapiens
  source 1..24: mol_type = other DNA; note = 1127 Target
tttgggatagttatgaattcaatc

SEQ ID NO: 805 - DNA, 24 bp, Homo sapiens
  source 1..24: mol_type = other DNA; note = 1128 Target
atgaattcaatcttcaaccctatt

SEQ ID NO: 806 - DNA, 24 bp, Homo sapiens
  source 1..24: mol_type = other DNA; note = 1129 Target
aagtttcagtcactctaagttact

SEQ ID NO: 807 - DNA, 24 bp, Homo sapiens
  source 1..24: mol_type = other DNA; note = 1130 Target
tcagtcactctaagttactttgca

SEQ ID NO: 808 - DNA, 24 bp, Homo sapiens
  source 1..24: mol_type = other DNA; note = 1131 Target
actctaagttactttgcactttcc

SEQ ID NO: 809 - DNA, 24 bp, Homo sapiens
  source 1..24: mol_type = other DNA; note = 1132 Target
actttgcactttccttagtgcgca

SEQ ID NO: 810 - DNA, 24 bp, Homo sapiens
  source 1..24: mol_type = other DNA; note = 1133 Target
cgcaaaagaaaattacagtcacta

SEQ ID NO: 811 - DNA, 24 bp, Homo sapiens
  source 1..24: mol_type = other DNA; note = 1134 Target
actaaacaattctgaccttttttt

SEQ ID NO: 812 - DNA, 24 bp, Homo sapiens
  source 1..24: mol_type = other DNA; note = 1135 Target
tgaattttattaataagataacct

SEQ ID NO: 813 - DNA, 24 bp, Homo sapiens
  source 1..24: mol_type = other DNA; note = 1136 Target
agacttcacaaatacaaaatacta

SEQ ID NO: 814 - DNA, 24 bp, Homo sapiens
  source 1..24: mol_type = other DNA; note = 1137 Target
tactaaaactttattttactggga

SEQ ID NO: 815 - DNA, 24 bp, Homo sapiens
  source 1..24: mol_type = other DNA; note = 1138 Target
gaacaatagaaaaatggatttctt

SEQ ID NO: 816 - DNA, 24 bp, Homo sapiens
  source 1..24: mol_type = other DNA; note = 1139 Target
acagaaaagccccatccttaggcc

SEQ ID NO: 817 - DNA, 24 bp, Homo sapiens
  source 1..24: mol_type = other DNA; note = 1140 Target
tcctgatattgggtctaaccccca

SEQ ID NO: 818 - DNA, 24 bp, Mus sp.
  source 1..24: mol_type = other DNA; note = 1141 Target
aaattttcctttagtgctgatttc

SEQ ID NO: 819 - DNA, 24 bp, Mus sp.
  source 1..24: mol_type = other DNA; note = 1142 Target
ctgatttctagattattattactg

SEQ ID NO: 820 - DNA, 24 bp, Mus sp.
  source 1..24: mol_type = other DNA; note = 1143 Target
gttgttgttattattgtcattatt

SEQ ID NO: 821 - DNA, 24 bp, Mus sp.
  source 1..24: mol_type = other DNA; note = 1144 Target
attatttgcatctgagaaccctta

SEQ ID NO: 822 - DNA, 24 bp, Mus sp.
  source 1..24: mol_type = other DNA; note = 1145 Target
gttatattattgatatatttttgg

SEQ ID NO: 823 - DNA, 24 bp, Mus sp.
  source 1..24: mol_type = other DNA; note = 1146 Target
tctttgatgacaataatgggggat

SEQ ID NO: 824 - DNA, 24 bp, Mus sp.
  source 1..24: mol_type = other DNA; note = 1147 Target
ggatacagttgaatttattacggt

SEQ ID NO: 825 - DNA, 24 bp, Mus sp.
  source 1..24: mol_type = other DNA; note = 1148 Target
tcatagggcctgcctgctcgacca

SEQ ID NO: 826 - DNA, 24 bp, Mus sp.
  source 1..24: mol_type = other DNA; note = 1149 Target
tgttactaattttataaatggagt

SEQ ID NO: 827 - DNA, 24 bp, Mus sp.
  source 1..24: mol_type = other DNA; note = 1150 Target
ttactaattttataaatggagttt

SEQ ID NO: 828 - DNA, 24 bp, Mus sp.
  source 1..24: mol_type = other DNA; note = 1151 Target
actaattttataaatggagtttcc

SEQ ID NO: 829 - DNA, 24 bp, Mus sp.
  source 1..24: mol_type = other DNA; note = 1152 Target
tccatttatatttacctttatttc

SEQ ID NO: 830 - DNA, 24 bp, Mus sp.
  source 1..24: mol_type = other DNA; note = 1153 Target
ttagtagatatttacaaacatgac

SEQ ID NO: 831 - DNA, 24 bp, Mus sp.
  source 1..24: mol_type = other DNA; note = 1154 Target
gatatttacaaacatgacagaaac

SEQ ID NO: 832 - DNA, 24 bp, Mus sp.
  source 1..24: mol_type = other DNA; note = 1155 Target
tgaatgcacagatataaacactta

SEQ ID NO: 833 - DNA, 24 bp, Mus sp.
  source 1..24: mol_type = other DNA; note = 1156 Target
ggtgaaaaaatataactttgagtg

SEQ ID NO: 834 - DNA, 24 bp, Mus sp.
  source 1..24: mol_type = other DNA; note = 1157 Target
aaaaaatataactttgagtgtagc

SEQ ID NO: 835 - DNA, 24 bp, Mus sp.
  source 1..24: mol_type = other DNA; note = 1158 Target
tagcagagaggaaccattgccacc

SEQ ID NO: 836 - DNA, 24 bp, Mus sp.
  source 1..24: mol_type = other DNA; note = 1159 Target
gcagagaggaaccattgccacctt

SEQ ID NO: 837 - DNA, 24 bp, Mus sp.
  source 1..24: mol_type = other DNA; note = 1160 Target
acgatcgggaactggcatcttcag

SEQ ID NO: 838 - DNA, 24 bp, Mus sp.
  source 1..24: mol_type = other DNA; note = 1161 Target
gcttaggtcagtgaagagaagaac

SEQ ID NO: 839 - DNA, 24 bp, Mus sp.
  source 1..24: mol_type = other DNA; note = 1162 Target
agtgaagagaagaacaaaaagcag

SEQ ID NO: 840 - DNA, 24 bp, Mus sp.
  source 1..24: mol_type = other DNA; note = 1163 Target
gaaacagggagagaaaaaccacac

SEQ ID NO: 841 - DNA, 24 bp, Mus sp.
  source 1..24: mol_type = other DNA; note = 1164 Target
atatgctgctttttgttcttctct

SEQ ID NO: 842 - DNA, 24 bp, Mus sp.
  source 1..24: mol_type = other DNA; note = 1165 Target
cccgatcgttacaggaaaatctga

SEQ ID NO: 843 - DNA, 24 bp, Mus sp.
  source 1..24: mol_type = other DNA; note = 1166 Target
gcaatggttcctctctgctacact

SEQ ID NO: 844 - DNA, 24 bp, Mus sp.
  source 1..24: mol_type = other DNA; note = 1167 Target
cctctctgctacactcaaagttat

SEQ ID NO: 845 - DNA, 24 bp, Mus sp.
  source 1..24: mol_type = other DNA; note = 1168 Target
tatatctgtgcattcaaactcaag

SEQ ID NO: 846 - DNA, 24 bp, Mus sp.
  source 1..24: mol_type = other DNA; note = 1169 Target
cattcaaactcaagatttagtgtt

SEQ ID NO: 847 - DNA, 24 bp, Mus sp.
  source 1..24: mol_type = other DNA; note = 1170 Target
tttctgtcatgtttgtaaatatct

SEQ ID NO: 848 - DNA, 24 bp, Mus sp.
  source 1..24: mol_type = other DNA; note = 1171 Target
tctgtcatgtttgtaaatatctac

SEQ ID NO: 849 - DNA, 24 bp, Mus sp.
  source 1..24: mol_type = other DNA; note = 1172 Target
atgtttgtaaatatctactaagac

SEQ ID NO: 850 - DNA, 24 bp, Mus sp.
  source 1..24: mol_type = other DNA; note = 1173 Target
tgtaaatatctactaagacaatgg

SEQ ID NO: 851 - DNA, 24 bp, Mus sp.
  source 1..24: mol_type = other DNA; note = 1174 Target
aatatctactaagacaatggtaaa

SEQ ID NO: 852 - DNA, 24 bp, Mus sp.
  source 1..24: mol_type = other DNA; note = 1175 Target
aataagaaataaaggtaaatataa

SEQ ID NO: 853 - DNA, 24 bp, Mus sp.
  source 1..24: mol_type = other DNA; note = 1176 Target
acacacacttttaatttttagtat

SEQ ID NO: 854 - DNA, 24 bp, Mus sp.
  source 1..24: mol_type = other DNA; note = 1177 Target
tagcatggtcgagcaggcaggccc

SEQ ID NO: 855 - DNA, 24 bp, Mus sp.
  source 1..24: mol_type = other DNA; note = 1178 Target
tccaacgtaatttgagtcattctg

SEQ ID NO: 856 - DNA, 24 bp, Mus sp.
  source 1..24: mol_type = other DNA; note = 1179 Target
attctgcctagcatttttttttaa

SEQ ID NO: 857 - DNA, 24 bp, Mus sp.
  source 1..24: mol_type = other DNA; note = 1180 Target
atcaaagataccaaaaatatatca

SEQ ID NO: 858 - DNA, 24 bp, Mus sp.
  source 1..24: mol_type = other DNA; note = 1181 Target
ctcagatgcaaataatgacaataa

SEQ ID NO: 859 - DNA, 24 bp, Mus sp.
  source 1..24: mol_type = other DNA; note = 1182 Target
ataataatctagaaatcagcacta

SEQ ID NO: 860 - DNA, 24 bp, Mus sp.
  source 1..24: mol_type = other DNA; note = 1183 Target
cgtgcaagttgagtccatccgccg

SEQ ID NO: 861 - DNA, 24 bp, Mus sp.
  source 1..24: mol_type = other DNA; note = 1184 Target
caagttgagtccatccgccggcca

SEQ ID NO: 862 - DNA, 24 bp, Mus sp.
  source 1..24: mol_type = other DNA; note = 1185 Target
gagtccatccgccggccagcgggg

SEQ ID NO: 863 - DNA, 24 bp, Mus sp.
  source 1..24: mol_type = other DNA; note = 1186 Target
catccgccggccagcgggggcggc

SEQ ID NO: 864 - DNA, 24 bp, Mus sp.
  source 1..24: mol_type = other DNA; note = 1187 Target
ccggccctcccctcggccccgcgc

SEQ ID NO: 865 - DNA, 24 bp, Mus sp.
  source 1..24: mol_type = other DNA; note = 1188 Target
gcaggaagcgcgcgctgggggcgg

SEQ ID NO: 866 - DNA, 24 bp, Mus sp.
  source 1..24: mol_type = other DNA; note = 1189 Target
gggctgagcggctgcggggcgggt

SEQ ID NO: 867 - DNA, 24 bp, Mus sp.
  source 1..24: mol_type = other DNA; note = 1190 Target
caagcacgtttccgacttgagttg

SEQ ID NO: 868 - DNA, 24 bp, Mus sp.
  source 1..24: mol_type = other DNA; note = 1191 Target
tccgacttgagttgcctcaagagg

SEQ ID NO: 869 - DNA, 24 bp, Mus sp.
  source 1..24: mol_type = other DNA; note = 1192 Target
gcctcaagaggggcgtgctgagcc

SEQ ID NO: 870 - DNA, 24 bp, Mus sp.
  source 1..24: mol_type = other DNA; note = 1193 Target
ctgagccagacctccatcgcgcac

SEQ ID NO: 871 - DNA, 24 bp, Mus sp.
  source 1..24: mol_type = other DNA; note = 1194 Target
gagggaaggagcgagggctcagtt

SEQ ID NO: 872 - DNA, 24 bp, Mus sp.
  source 1..24: mol_type = other DNA; note = 1195 Target
gggctgttttggaggcaggaagca

SEQ ID NO: 873 - DNA, 24 bp, Mus sp.
  source 1..24: mol_type = other DNA; note = 1196 Target
tttaatctacctcgatggaaaata

SEQ ID NO: 874 - DNA, 24 bp, Mus sp.
  source 1..24: mol_type = other DNA; note = 1197 Target
gttatcagtaagggagctgcagtg

SEQ ID NO: 875 - DNA, 24 bp, Mus sp.
  source 1..24: mol_type = other DNA; note = 1198 Target
atcagtaagggagctgcagtggag

SEQ ID NO: 876 - DNA, 24 bp, Mus sp.
  source 1..24: mol_type = other DNA; note = 1199 Target
agggagctgcagtggagtaggcgg

SEQ ID NO: 877 - DNA, 24 bp, Mus sp.
  source 1..24: mol_type = other DNA; note = 1200 Target
gagtaggcggggagaaggccgcac

SEQ ID NO: 878 - DNA, 24 bp, Mus sp.
  source 1..24: mol_type = other DNA; note = 1201 Target
ggcggggagaaggccgcacccttc

SEQ ID NO: 879 - DNA, 24 bp, Mus sp.
  source 1..24: mol_type = other DNA; note = 1202 Target
ttgcaatacctttctgggagttct

SEQ ID NO: 880 - DNA, 24 bp, Mus sp.
  source 1..24: mol_type = other DNA; note = 1203 Target
gcaatacctttctgggagttctct

SEQ ID NO: 881 - DNA, 24 bp, Mus sp.
  source 1..24: mol_type = other DNA; note = 1204 Target
ctctgctgcctcctggcttctgag

SEQ ID NO: 882 - DNA, 24 bp, Mus sp.
  source 1..24: mol_type = other DNA; note = 1205 Target
atctgcaactccagtctttctaga

SEQ ID NO: 883 - DNA, 24 bp, Mus sp.
  source 1..24: mol_type = other DNA; note = 1206 Target
tttctagaagatgggcgggagtct

SEQ ID NO: 884 - DNA, 24 bp, Mus sp.
  source 1..24: mol_type = other DNA; note = 1207 Target
ttctgggcaggcttaaaggctaac

SEQ ID NO: 885 - DNA, 24 bp, Mus sp.
  source 1..24: mol_type = other DNA; note = 1208 Target
tgtgggcgttgtcctgcaggggaa

SEQ ID NO: 886 - DNA, 24 bp, Mus sp.
  source 1..24: mol_type = other DNA; note = 1209 Target
tgggcgttgtcctgcaggggaatt

SEQ ID NO: 887 - DNA, 24 bp, Mus sp.
  source 1..24: mol_type = other DNA; note = 1210 Target
ggcgttgtcctgcaggggaattga

SEQ ID NO: 888 - DNA, 24 bp, Mus sp.
  source 1..24: mol_type = other DNA; note = 1211 Target
gtcctgcaggggaattgaacaggt

SEQ ID NO: 889 - DNA, 24 bp, Mus sp.
  source 1..24: mol_type = other DNA; note = 1212 Target
ctgcaggggaattgaacaggtgta

SEQ ID NO: 890 - DNA, 24 bp, Mus sp.
  source 1..24: mol_type = other DNA; note = 1213 Target
taaaattggagggacaagacttcc

SEQ ID NO: 891 - DNA, 24 bp, Mus sp.
  source 1..24: mol_type = other DNA; note = 1214 Target
aaattggagggacaagacttccca

SEQ ID NO: 892 - DNA, 24 bp, Mus sp.
  source 1..24: mol_type = other DNA; note = 1215 Target
ttgtcgggaagttttttaataggg

SEQ ID NO: 893 - DNA, 24 bp, Mus sp.
  source 1..24: mol_type = other DNA; note = 1216 Target
gggaagttttttaataggggcaaa

SEQ ID NO: 894 - DNA, 24 bp, Mus sp.
  source 1..24: mol_type = other DNA; note = 1217 Target
ttttaataggggcaaataaggaaa

SEQ ID NO: 895 - DNA, 24 bp, Mus sp.
  source 1..24: mol_type = other DNA; note = 1218 Target
gtcatctggggttttatgcagcaa

SEQ ID NO: 896 - DNA, 24 bp, Mus sp.
  source 1..24: mol_type = other DNA; note = 1219 Target
atctggggttttatgcagcaaaac

SEQ ID NO: 897 - DNA, 24 bp, Mus sp.
  source 1..24: mol_type = other DNA; note = 1220 Target
ttatgcagcaaaactacaggttat

SEQ ID NO: 898 - DNA, 24 bp, Mus sp.
  source 1..24: mol_type = other DNA; note = 1221 Target
attattgcttgtgatccgcctcgg

SEQ ID NO: 899 - DNA, 24 bp, Mus sp.
  source 1..24: mol_type = other DNA; note = 1222 Target
atccgcctcggagtattttccatc

SEQ ID NO: 900 - DNA, 24 bp, Mus sp.
  source 1..24: mol_type = other DNA; note = 1223 Target
ttttccatcgaggtagattaaaga

SEQ ID NO: 901 - DNA, 24 bp, Mus sp.
  source 1..24: mol_type = other DNA; note = 1224 Target
gattaaagacatgctcacccgagt

SEQ ID NO: 902 - DNA, 24 bp, Mus sp.
  source 1..24: mol_type = other DNA; note = 1225 Target
tgaaattacagtgtcgcgagttag

SEQ ID NO: 903 - DNA, 24 bp, Mus sp.
  source 1..24: mol_type = other DNA; note = 1226 Target
tcgcgagttagactatgtaagcag

SEQ ID NO: 904 - DNA, 24 bp, Mus sp.
  source 1..24: mol_type = other DNA; note = 1227 Target
gcgagttagactatgtaagcagaa

SEQ ID NO: 905 - DNA, 24 bp, Mus sp.
  source 1..24: mol_type = other DNA; note = 1228 Target
agactatgtaagcagaattttaat

SEQ ID NO: 906 - DNA, 24 bp, Mus sp.
  source 1..24: mol_type = other DNA; note = 1229 Target
agcagaattttaatcatttttaaa

SEQ ID NO: 907 - DNA, 24 bp, Mus sp.
  source 1..24: mol_type = other DNA; note = 1230 Target
cttcatatccatttctcccgctcc

SEQ ID NO: 908 - DNA, 24 bp, Mus sp.
  source 1..24: mol_type = other DNA; note = 1231 Target
ttttagaacactcattttagcccc

SEQ ID NO: 909 - DNA, 24 bp, Mus sp.
  source 1..24: mol_type = other DNA; note = 1232 Target
acatacaccacaaatcgaggctgt

SEQ ID NO: 910 - DNA, 24 bp, Mus sp.
  source 1..24: mol_type = other DNA; note = 1233 Target
gctggggcctcaacactgcagttc

SEQ ID NO: 911 - DNA, 24 bp, Mus sp.
  source 1..24: mol_type = other DNA; note = 1234 Target
cttttataactccttagtacactt

SEQ ID NO: 912 - DNA, 24 bp, Mus sp.
  source 1..24: mol_type = other DNA; note = 1235 Target
tactaaggagttataaaagaactg

SEQ ID NO: 913 - DNA, 24 bp, Mus sp.
  source 1..24: mol_type = other DNA; note = 1236 Target
ctaaggagttataaaagaactgca

SEQ ID NO: 914 - DNA, 24 bp, Mus sp.
  source 1..24: mol_type = other DNA; note = 1237 Target
ataaaagaactgcagtgttgaggc

SEQ ID NO: 915 - DNA, 24 bp, Mus sp.
  source 1..24: mol_type = other DNA; note = 1238 Target
ttgaggccccagctacagcctcga

SEQ ID NO: 916 - DNA, 24 bp, Mus sp.
  source 1..24: mol_type = other DNA; note = 1239 Target
gaggccccagctacagcctcgatt

SEQ ID NO: 917 - DNA, 24 bp, Mus sp.
  source 1..24: mol_type = other DNA; note = 1240 Target
gtgtatgtaactaatctgtctggt

SEQ ID NO: 918 - DNA, 24 bp, Mus sp.
  source 1..24: mol_type = other DNA; note = 1241 Target
tatgtaactaatctgtctggtttc

SEQ ID NO: 919 - DNA, 24 bp, Mus sp.
  source 1..24: mol_type = other DNA; note = 1242 Target
tgtaactaatctgtctggtttcat

SEQ ID NO: 920 - DNA, 24 bp, Mus sp.
  source 1..24: mol_type = other DNA; note = 1243 Target
actaatctgtctggtttcatgagt

SEQ ID NO: 921 - DNA, 24 bp, Mus sp.
  source 1..24: mol_type = other DNA; note = 1244 Target
tcatgagtcatcagacttctaaga

SEQ ID NO: 922 - DNA, 24 bp, Mus sp.
  source 1..24: mol_type = other DNA; note = 1245 Target
atcagacttctaagatcaggaaag

SEQ ID NO: 923 - DNA, 24 bp, Mus sp.
  source 1..24: mol_type = other DNA; note = 1246 Target
taggggttggataagccagtataa

SEQ ID NO: 924 - DNA, 24 bp, Mus sp.
  source 1..24: mol_type = other DNA; note = 1247 Target
ggataagccagtataataaatgaa

SEQ ID NO: 925 - DNA, 24 bp, Mus sp.
  source 1..24: mol_type = other DNA; note = 1248 Target
taataaatgaaaatggggctaaaa

SEQ ID NO: 926 - DNA, 24 bp, Mus sp.
  source 1..24: mol_type = other DNA; note = 1249 Target
ttctaaaataccttttgataaggc

SEQ ID NO: 927 - DNA, 24 bp, Mus sp.
  source 1..24: mol_type = other DNA; note = 1250 Target
ctaaaataccttttgataaggctg

SEQ ID NO: 928 - DNA, 24 bp, Mus sp.
  source 1..24: mol_type = other DNA; note = 1251 Target
ctgggctctttaaaaatgattaaa

SEQ ID NO: 929 - DNA, 24 bp, Mus sp.
  source 1..24: mol_type = other DNA; note = 1252 Target
taactcgcgacactgtaatttcat

SEQ ID NO: 930 - DNA, 24 bp, Mus sp.
  source 1..24: mol_type = other DNA; note = 1253 Target
atttcatactgtagtaaggatctc

SEQ ID NO: 931 - DNA, 24 bp, Mus sp.
  source 1..24: mol_type = other DNA; note = 1254 Target
taaaactcgggtgagcatgtcttt

SEQ ID NO: 932 - DNA, 24 bp, Mus sp.
  source 1..24: mol_type = other DNA; note = 1255 Target
agcatgtctttaatctacctcgat

SEQ ID NO: 933 - DNA, 24 bp, Mus sp.
  source 1..24: mol_type = other DNA; note = 1256 Target
ttggaggcaggaagcacttgctct

SEQ ID NO: 934 - DNA, 24 bp, Mus sp.
  source 1..24: mol_type = other DNA; note = 1257 Target
gttttgctgcataaaaccccagat

SEQ ID NO: 935 - DNA, 24 bp, Mus sp.
  source 1..24: mol_type = other DNA; note = 1258 Target
ttgctgcataaaaccccagatgac

SEQ ID NO: 936 - DNA, 24 bp, Mus sp.
  source 1..24: mol_type = other DNA; note = 1259 Target
ggaagtcttgtccctccaatttta

SEQ ID NO: 937 - DNA, 24 bp, Mus sp.
  source 1..24: mol_type = other DNA; note = 1260 Target
ttgtccctccaattttacacctgt

SEQ ID NO: 938 - DNA, 24 bp, Mus sp.
  source 1..24: mol_type = other DNA; note = 1261 Target
cctccaattttacacctgttcaat

SEQ ID NO: 939 - DNA, 24 bp, Mus sp.
  source 1..24: mol_type = other DNA; note = 1262 Target
caattcccctgcaggacaacgccc

SEQ ID NO: 940 - DNA, 24 bp, Mus sp.
  source 1..24: mol_type = other DNA; note = 1263 Target
agcctttaagcctgcccagaagac

SEQ ID NO: 941 - DNA, 24 bp, Mus sp.
  source 1..24: mol_type = other DNA; note = 1264 Target
ctcagaagccaggaggcagcagag

SEQ ID NO: 942 - DNA, 24 bp, Mus sp.
  source 1..24: mol_type = other DNA; note = 1265 Target
cggccttctccccgcctactccac

SEQ ID NO: 943 - DNA, 24 bp, Mus sp.
  source 1..24: mol_type = other DNA; note = 1266 Target
ggaaacgtgcttgcacccgccccg

SEQ ID NO: 944 - DNA, 24 bp, Mus sp.
  source 1..24: mol_type = other DNA; note = 1267 Target
gcgcaggggcgcgcggccagactc

SEQ ID NO: 945 - DNA, 225 bp, Homo sapiens
  source 1..225: mol_type = other DNA; note = 1077 Primer Binding Sequence
agagtgactgaaacttcacagaatagggttgaagattgaattcataactatcccaaagacctatccattgcactatgctttatttaaaaaccacaaaacctgtgctgttgatctcataaatagaacttgtatttatatttattttcattttagtctgtcttcttggttgctgttgatagacactaaaagagtattagatattatctaagtttgaatataaggcta

SEQ ID NO: 946 - DNA, 225 bp, Homo sapiens
  source 1..225: mol_type = other DNA; note = 1078 Primer Binding Sequence
atagggttgaagattgaattcataactatcccaaagacctatccattgcactatgctttatttaaaaaccacaaaacctgtgctgttgatctcataaatagaacttgtatttatatttattttcattttagtctgtcttcttggttgctgttgatagacactaaaagagtattagatattatctaagtttgaatataaggctataaatatttaataatttttaaa

SEQ ID NO: 947 - DNA, 225 bp, Homo sapiens
  source 1..225: mol_type = other DNA; note = 1079 Primer Binding Sequence
ctatcccaaagacctatccattgcactatgctttatttaaaaaccacaaaacctgtgctgttgatctcataaatagaacttgtatttatatttattttcattttagtctgtcttcttggttgctgttgatagacactaaaagagtattagatattatctaagtttgaatataaggctataaatatttaataatttttaaaatagtattcttggtaattgaattat

SEQ ID NO: 948 - DNA, 225 bp, Homo sapiens
  source 1..225: mol_type = other DNA; note = 1080 Primer Binding Sequence
gacctatccattgcactatgctttatttaaaaaccacaaaacctgtgctgttgatctcataaatagaacttgtatttatatttattttcattttagtctgtcttcttggttgctgttgatagacactaaaagagtattagatattatctaagtttgaatataaggctataaatatttaataatttttaaaatagtattcttggtaattgaattattcttctgttt

SEQ ID NO: 949 - DNA, 225 bp, Homo sapiens
  source 1..225: mol_type = other DNA; note = 1081 Primer Binding Sequence
tccattgcactatgctttatttaaaaaccacaaaacctgtgctgttgatctcataaatagaacttgtatttatatttattttcattttagtctgtcttcttggttgctgttgatagacactaaaagagtattagatattatctaagtttgaatataaggctataaatatttaataatttttaaaatagtattcttggtaattgaattattcttctgtttaaaggc

SEQ ID NO: 950 - DNA, 225 bp, Homo sapiens
  source 1..225: mol_type = other DNA; note = 1082 Primer Binding Sequence
aaatagaacttgtatttatatttattttcattttagtctgtcttcttggttgctgttgatagacactaaaagagtattagatattatctaagtttgaatataaggctataaatatttaataatttttaaaatagtattcttggtaattgaattattcttctgtttaaaggcagaagaaataattgaacatcatcctgagtttttctgtaggaatcagagcccaat

SEQ ID NO: 951 - DNA, 225 bp, Homo sapiens
  source 1..225: mol_type = other DNA; note = 1083 Primer Binding Sequence
acttgtatttatatttattttcattttagtctgtcttcttggttgctgttgatagacactaaaagagtattagatattatctaagtttgaatataaggctataaatatttaataatttttaaaatagtattcttggtaattgaattattcttctgtttaaaggcagaagaaataattgaacatcatcctgagtttttctgtaggaatcagagcccaatattttga

SEQ ID NO: 952 - DNA, 225 bp, Homo sapiens
  source 1..225: mol_type = other DNA; note = 1084 Primer Binding Sequence
atttatatttattttcattttagtctgtcttcttggttgctgttgatagacactaaaagagtattagatattatctaagtttgaatataaggctataaatatttaataatttttaaaatagtattcttggtaattgaattattcttctgtttaaaggcagaagaaataattgaacatcatcctgagtttttctgtaggaatcagagcccaatattttgaaacaaa

SEQ ID NO: 953 - DNA, 225 bp, Homo sapiens
  source 1..225: mol_type = other DNA; note = 1085 Primer Binding Sequence
tatttattttcattttagtctgtcttcttggttgctgttgatagacactaaaagagtattagatattatctaagtttgaatataaggctataaatatttaataatttttaaaatagtattcttggtaattgaattattcttctgtttaaaggcagaagaaataattgaacatcatcctgagtttttctgtaggaatcagagcccaatattttgaaacaaatgcat

SEQ ID NO: 954 - DNA, 225 bp, Homo sapiens
  source 1..225: mol_type = other DNA; note = 1086 Primer Binding Sequence
cattttagtctgtcttcttggttgctgttgatagacactaaaagagtattagatattatctaagtttgaatataaggctataaatatttaataatttttaaaatagtattcttggtaattgaattattcttctgtttaaaggcagaagaaataattgaacatcatcctgagtttttctgtaggaatcagagcccaatattttgaaacaaatgcataatctaagtc

SEQ ID NO: 955 - DNA, 225 bp, Homo sapiens
  source 1..225: mol_type = other DNA; note = 1087 Primer Binding Sequence
agacactaaaagagtattagatattatctaagtttgaatataaggctataaatatttaataatttttaaaatagtattcttggtaattgaattattcttctgtttaaaggcagaagaaataattgaacatcatcctgagtttttctgtaggaatcagagcccaatattttgaaacaaatgcataatctaagtcaaatggaaagaaatataaaaagtaacattatt

SEQ ID NO: 956 - DNA, 225 bp, Homo sapiens
  source 1..225: mol_type = other DNA; note = 1088 Primer Binding Sequence
ttagatattatctaagtttgaatataaggctataaatatttaataatttttaaaatagtattcttggtaattgaattattcttctgtttaaaggcagaagaaataattgaacatcatcctgagtttttctgtaggaatcagagcccaatattttgaaacaaatgcataatctaagtcaaatggaaagaaatataaaaagtaacattattacttcttgttttcttc

SEQ ID NO: 957 - DNA, 225 bp, Homo sapiens
  source 1..225: mol_type = other DNA; note = 1089 Primer Binding Sequence
atctaagtttgaatataaggctataaatatttaataatttttaaaatagtattcttggtaattgaattattcttctgtttaaaggcagaagaaataattgaacatcatcctgagtttttctgtaggaatcagagcccaatattttgaaacaaatgcataatctaagtcaaatggaaagaaatataaaaagtaacattattacttcttgttttcttcagtatttaa

SEQ ID NO: 958 - DNA, 225 bp, Homo sapiens
  source 1..225: mol_type = other DNA; note = 1090 Primer Binding Sequence
agtttgaatataaggctataaatatttaataatttttaaaatagtattcttggtaattgaattattcttctgtttaaaggcagaagaaataattgaacatcatcctgagtttttctgtaggaatcagagcccaatattttgaaacaaatgcataatctaagtcaaatggaaagaaatataaaaagtaacattattacttcttgttttcttcagtatttaacaatc

SEQ ID NO: 959 - DNA, 225 bp, Homo sapiens
  source 1..225: mol_type = other DNA; note = 1091 Primer Binding Sequence
aatataaggctataaatatttaataatttttaaaatagtattcttggtaattgaattattcttctgtttaaaggcagaagaaataattgaacatcatcctgagtttttctgtaggaatcagagcccaatattttgaaacaaatgcataatctaagtcaaatggaaagaaatataaaaagtaacattattacttcttgttttcttcagtatttaacaatccttttt

SEQ ID NO: 960 - DNA, 225 bp, Homo sapiens
  source 1..225: mol_type = other DNA; note = 1092 Primer Binding Sequence
ttttaaaatagtattcttggtaattgaattattcttctgtttaaaggcagaagaaataattgaacatcatcctgagtttttctgtaggaatcagagcccaatattttgaaacaaatgcataatctaagtcaaatggaaagaaatataaaaagtaacattattacttcttgttttcttcagtatttaacaatccttttttttcttcccttgcccagacaagagtga

SEQ ID NO: 961 - DNA, 225 bp, Homo sapiens
  source 1..225: mol_type = other DNA; note = 1093 Primer Binding Sequence
atagtattcttggtaattgaattattcttctgtttaaaggcagaagaaataattgaacatcatcctgagtttttctgtaggaatcagagcccaatattttgaaacaaatgcataatctaagtcaaatggaaagaaatataaaaagtaacattattacttcttgttttcttcagtatttaacaatccttttttttcttcccttgcccagacaagagtgaggttgct

SEQ ID NO: 962 - DNA, 225 bp, Homo sapiens
  source 1..225: mol_type = other DNA; note = 1094 Primer Binding Sequence
tggtaattgaattattcttctgtttaaaggcagaagaaataattgaacatcatcctgagtttttctgtaggaatcagagcccaatattttgaaacaaatgcataatctaagtcaaatggaaagaaatataaaaagtaacattattacttcttgttttcttcagtatttaacaatccttttttttcttcccttgcccagacaagagtgaggttgctcatcggttta

SEQ ID NO: 963 - DNA, 225 bp, Homo sapiens
  source 1..225: mol_type = other DNA; note = 1095 Primer Binding Sequence
taaaggcagaagaaataattgaacatcatcctgagtttttctgtaggaatcagagcccaatattttgaaacaaatgcataatctaagtcaaatggaaagaaatataaaaagtaacattattacttcttgttttcttcagtatttaacaatccttttttttcttcccttgcccagacaagagtgaggttgctcatcggtttaaagatttgggagaagaaaatttca

SEQ ID NO: 964 - DNA, 225 bp, Homo sapiens
  source 1..225: mol_type = other DNA; note = 1096 Primer Binding Sequence
tgcataatctaagtcaaatggaaagaaatataaaaagtaacattattacttcttgttttcttcagtatttaacaatccttttttttcttcccttgcccagacaagagtgaggttgctcatcggtttaaagatttgggagaagaaaatttcaaagccttgtaagttaaaatattgatgaatcaaatttaatgtttctaatagtgttgtttattattctaaagtgct

SEQ ID NO: 965 - DNA, 225 bp, Homo sapiens
  source 1..225: mol_type = other DNA; note = 1097 Primer Binding Sequence
aatctaagtcaaatggaaagaaatataaaaagtaacattattacttcttgttttcttcagtatttaacaatccttttttttcttcccttgcccagacaagagtgaggttgctcatcggtttaaagatttgggagaagaaaatttcaaagccttgtaagttaaaatattgatgaatcaaatttaatgtttctaatagtgttgtttattattctaaagtgcttatat

SEQ ID NO: 966 - DNA, 225 bp, Homo sapiens
  source 1..225: mol_type = other DNA; note = 1098 Primer Binding Sequence
atataaaaagtaacattattacttcttgttttcttcagtatttaacaatccttttttttcttcccttgcccagacaagagtgaggttgctcatcggtttaaagatttgggagaagaaaatttcaaagccttgtaagttaaaatattgatgaatcaaatttaatgtttctaatagtgttgtttattattctaaagtgcttatatttccttgtcatcagggttcaga

SEQ ID NO: 967 - DNA, 225 bp, Homo sapiens
  source 1..225: mol_type = other DNA; note = 1099 Primer Binding Sequence
cttgttttcttcagtatttaacaatccttttttttcttcccttgcccagacaagagtgaggttgctcatcggtttaaagatttgggagaagaaaatttcaaagccttgtaagttaaaatattgatgaatcaaatttaatgtttctaatagtgttgtttattattctaaagtgcttatatttccttgtcatcagggttcagattctaaaacagtgctgcctcgtag

SEQ ID NO: 968 - DNA, 225 bp, Homo sapiens
  source 1..225: mol_type = other DNA; note = 1100 Primer Binding Sequence
ttttcttcagtatttaacaatccttttttttcttcccttgcccagacaagagtgaggttgctcatcggtttaaagatttgggagaagaaaatttcaaagccttgtaagttaaaatattgatgaatcaaatttaatgtttctaatagtgttgtttattattctaaagtgcttatatttccttgtcatcagggttcagattctaaaacagtgctgcctcgtagagtt

SEQ ID NO: 969 - DNA, 225 bp, Homo sapiens
  source 1..225: mol_type = other DNA; note = 1101 Primer Binding Sequence
gtatttaacaatccttttttttcttcccttgcccagacaagagtgaggttgctcatcggtttaaagatttgggagaagaaaatttcaaagccttgtaagttaaaatattgatgaatcaaatttaatgtttctaatagtgttgtttattattctaaagtgcttatatttccttgtcatcagggttcagattctaaaacagtgctgcctcgtagagttttctgcgtt

SEQ ID NO: 970 - DNA, 225 bp, Homo sapiens
  source 1..225: mol_type = other DNA; note = 1102 Primer Binding Sequence
aacaatccttttttttcttcccttgcccagacaagagtgaggttgctcatcggtttaaagatttgggagaagaaaatttcaaagccttgtaagttaaaatattgatgaatcaaatttaatgtttctaatagtgttgtttattattctaaagtgcttatatttccttgtcatcagggttcagattctaaaacagtgctgcctcgtagagttttctgcgttgaggaa

SEQ ID NO: 971 - DNA, 225 bp, Homo sapiens
  source 1..225: mol_type = other DNA; note = 1103 Primer Binding Sequence
cccttgcccagacaagagtgaggttgctcatcggtttaaagatttgggagaagaaaatttcaaagccttgtaagttaaaatattgatgaatcaaatttaatgtttctaatagtgttgtttattattctaaagtgcttatatttccttgtcatcagggttcagattctaaaacagtgctgcctcgtagagttttctgcgttgaggaagatattctgtatctgggct

SEQ ID NO: 972 - DNA, 225 bp, Homo sapiens
  source 1..225: mol_type = other DNA; note = 1104 Primer Binding Sequence
tgaggttgctcatcggtttaaagatttgggagaagaaaatttcaaagccttgtaagttaaaatattgatgaatcaaatttaatgtttctaatagtgttgtttattattctaaagtgcttatatttccttgtcatcagggttcagattctaaaacagtgctgcctcgtagagttttctgcgttgaggaagatattctgtatctgggctatccaataaggtagtcac

SEQ ID NO: 973 - DNA, 225 bp, Homo sapiens
  source 1..225: mol_type = other DNA; note = 1105 Primer Binding Sequence
caaagccttgtaagttaaaatattgatgaatcaaatttaatgtttctaatagtgttgtttattattctaaagtgcttatatttccttgtcatcagggttcagattctaaaacagtgctgcctcgtagagttttctgcgttgaggaagatattctgtatctgggctatccaataaggtagtcactggtcacatggctattgagtacttcaaatatgacaagtgcaa

SEQ ID NO: 974 - DNA, 225 bp, Homo sapiens
  source 1..225: mol_type = other DNA; note = 1106 Primer Binding Sequence
gtaagttaaaatattgatgaatcaaatttaatgtttctaatagtgttgtttattattctaaagtgcttatatttccttgtcatcagggttcagattctaaaacagtgctgcctcgtagagttttctgcgttgaggaagatattctgtatctgggctatccaataaggtagtcactggtcacatggctattgagtacttcaaatatgacaagtgcaactgagaaac

SEQ ID NO: 975 - DNA, 225 bp, Homo sapiens
  source 1..225: mol_type = other DNA; note = 1107 Primer Binding Sequence
aatcaaatttaatgtttctaatagtgttgtttattattctaaagtgcttatatttccttgtcatcagggttcagattctaaaacagtgctgcctcgtagagttttctgcgttgaggaagatattctgtatctgggctatccaataaggtagtcactggtcacatggctattgagtacttcaaatatgacaagtgcaactgagaaacaaaaacttaaattgtattt

SEQ ID NO: 976 - DNA, 225 bp, Homo sapiens
  source 1..225: mol_type = other DNA; note = 1108 Primer Binding Sequence
tctaaagtgcttatatttccttgtcatcagggttcagattctaaaacagtgctgcctcgtagagttttctgcgttgaggaagatattctgtatctgggctatccaataaggtagtcactggtcacatggctattgagtacttcaaatatgacaagtgcaactgagaaacaaaaacttaaattgtatttaattgtagttaatttgaatgtatatagtcacatgtgg

SEQ ID NO: 977 - DNA, 225 bp, Homo sapiens
  source 1..225: mol_type = other DNA; note = 1109 Primer Binding Sequence
gcttatatttccttgtcatcagggttcagattctaaaacagtgctgcctcgtagagttttctgcgttgaggaagatattctgtatctgggctatccaataaggtagtcactggtcacatggctattgagtacttcaaatatgacaagtgcaactgagaaacaaaaacttaaattgtatttaattgtagttaatttgaatgtatatagtcacatgtggctaatggc

SEQ ID NO: 978 - DNA, 225 bp, Homo sapiens
  source 1..225: mol_type = other DNA; note = 1110 Primer Binding Sequence
tgcctcgtagagttttctgcgttgaggaagatattctgtatctgggctatccaataaggtagtcactggtcacatggctattgagtacttcaaatatgacaagtgcaactgagaaacaaaaacttaaattgtatttaattgtagttaatttgaatgtatatagtcacatgtggctaatggctactgtattggacagtacagctctggaacttgcttggtggaaag

SEQ ID NO: 979 - DNA, 225 bp, Homo sapiens
  source 1..225: mol_type = other DNA; note = 1111 Primer Binding Sequence
aggaagatattctgtatctgggctatccaataaggtagtcactggtcacatggctattgagtacttcaaatatgacaagtgcaactgagaaacaaaaacttaaattgtatttaattgtagttaatttgaatgtatatagtcacatgtggctaatggctactgtattggacagtacagctctggaacttgcttggtggaaaggactttaatataggtttcctttgg

SEQ ID NO: 980 - DNA, 225 bp, Homo sapiens
  source 1..225: mol_type = other DNA; note = 1112 Primer Binding Sequence
tgggctatccaataaggtagtcactggtcacatggctattgagtacttcaaatatgacaagtgcaactgagaaacaaaaacttaaattgtatttaattgtagttaatttgaatgtatatagtcacatgtggctaatggctactgtattggacagtacagctctggaacttgcttggtggaaaggactttaatataggtttcctttggtggcttacccactaaatc

SEQ ID NO: 981 - DNA, 225 bp, Homo sapiens
  source 1..225: mol_type = other DNA; note = 1113 Primer Binding Sequence
aataaggtagtcactggtcacatggctattgagtacttcaaatatgacaagtgcaactgagaaacaaaaacttaaattgtatttaattgtagttaatttgaatgtatatagtcacatgtggctaatggctactgtattggacagtacagctctggaacttgcttggtggaaaggactttaatataggtttcctttggtggcttacccactaaatcttctttacat

SEQ ID NO: 982 - DNA, 225 bp, Homo sapiens
  source 1..225: mol_type = other DNA; note = 1114 Primer Binding Sequence
taatatctaatactcttttagtgtctatcaacagcaaccaagaagacagactaaaatgaaaataaatataaatacaagttctatttatgagatcaacagcacaggttttgtggtttttaaataaagcatagtgcaatggataggtctttgggatagttatgaattcaatcttcaaccctattctgtgaagtttcagtcactctaagttactttgcactttcctta

SEQ ID NO: 983 - DNA, 225 bp, Homo sapiens
  source 1..225: mol_type = other DNA; note = 1115 Primer Binding Sequence
aacagcaaccaagaagacagactaaaatgaaaataaatataaatacaagttctatttatgagatcaacagcacaggttttgtggtttttaaataaagcatagtgcaatggataggtctttgggatagttatgaattcaatcttcaaccctattctgtgaagtttcagtcactctaagttactttgcactttccttagtgcgcaaaagaaaattacagtcactaaa

SEQ ID NO: 984 - DNA, 225 bp, Homo sapiens
  source 1..225: mol_type = other DNA; note = 1116 Primer Binding Sequence
aaatgaaaataaatataaatacaagttctatttatgagatcaacagcacaggttttgtggtttttaaataaagcatagtgcaatggataggtctttgggatagttatgaattcaatcttcaaccctattctgtgaagtttcagtcactctaagttactttgcactttccttagtgcgcaaaagaaaattacagtcactaaacaattctgaccttttttttttttt

SEQ ID NO: 985 - DNA, 225 bp, Homo sapiens
  source 1..225: mol_type = other DNA; note = 1117 Primer Binding Sequence
ataaatataaatacaagttctatttatgagatcaacagcacaggttttgtggtttttaaataaagcatagtgcaatggataggtctttgggatagttatgaattcaatcttcaaccctattctgtgaagtttcagtcactctaagttactttgcactttccttagtgcgcaaaagaaaattacagtcactaaacaattctgacctttttttttttttacctagga

SEQ ID NO: 986 - DNA, 225 bp, Homo sapiens
  source 1..225: mol_type = other DNA; note = 1118 Primer Binding Sequence
ttttgtggtttttaaataaagcatagtgcaatggataggtctttgggatagttatgaattcaatcttcaaccctattctgtgaagtttcagtcactctaagttactttgcactttccttagtgcgcaaaagaaaattacagtcactaaacaattctgacctttttttttttttacctaggatgtttgaattttattaataagataaccttgtaagacttcacaaa

SEQ ID NO: 987 - DNA, 225 bp, Homo sapiens
  source 1..225: mol_type = other DNA; note = 1119 Primer Binding Sequence
atagttatgaattcaatcttcaaccctattctgtgaagtttcagtcactctaagttactttgcactttccttagtgcgcaaaagaaaattacagtcactaaacaattctgacctttttttttttttacctaggatgtttgaattttattaataagataaccttgtaagacttcacaaatacaaaatactatgccattttagaaataaatgccaaaataattcttt

SEQ ID NO: 988 - DNA, 225 bp, Homo sapiens
  source 1..225: mol_type = other DNA; note = 1120 Primer Binding Sequence
ttttacctaggatgtttgaattttattaataagataaccttgtaagacttcacaaatacaaaatactatgccattttagaaataaatgccaaaataattctttaaagatgcagagtttactaaaactttattttactgggaaaatagaataaaagttgaacaatagaaaaatggatttcttacgtgcatctcgacgaaacacacccctggaataagccgagctaa

SEQ ID NO: 989 - DNA, 225 bp, Homo sapiens
  source 1..225: mol_type = other DNA; note = 1121 Primer Binding Sequence
ttacctaggatgtttgaattttattaataagataaccttgtaagacttcacaaatacaaaatactatgccattttagaaataaatgccaaaataattctttaaagatgcagagtttactaaaactttattttactgggaaaatagaataaaagttgaacaatagaaaaatggatttcttacgtgcatctcgacgaaacacacccctggaataagccgagctaaag

SEQ ID NO: 990 - DNA, 225 bp, Homo sapiens
  source 1..225: mol_type = other DNA; note = 1122 Primer Binding Sequence
acaaaatactatgccattttagaaataaatgccaaaataattctttaaagatgcagagtttactaaaactttattttactgggaaaatagaataaaagttgaacaatagaaaaatggatttcttacgtgcatctcgacgaaacacacccctggaataagccgagctaaagagaaaaagaagggaaataaaggttacccacttcattgtgccaaaggcgtgtgggg

SEQ ID NO: 991 - DNA, 225 bp, Homo sapiens
  source 1..225: mol_type = other DNA; note = 1123 Primer Binding Sequence
aatgccaaaataattctttaaagatgcagagtttactaaaactttattttactgggaaaatagaataaaagttgaacaatagaaaaatggatttcttacgtgcatctcgacgaaacacacccctggaataagccgagctaaagagaaaaagaagggaaataaaggttacccacttcattgtgccaaaggcgtgtggggttgacagaagagaaaagctaggacaaa

SEQ ID NO: 992 - DNA, 225 bp, Homo sapiens
  source 1..225: mol_type = other DNA; note = 1124 Primer Binding Sequence
caaaataattctttaaagatgcagagtttactaaaactttattttactgggaaaatagaataaaagttgaacaatagaaaaatggatttcttacgtgcatctcgacgaaacacacccctggaataagccgagctaaagagaaaaagaagggaaataaaggttacccacttcattgtgccaaaggcgtgtggggttgacagaagagaaaagctaggacaaacggag

SEQ ID NO: 993 - DNA, 225 bp, Homo sapiens
  source 1..225: mol_type = other DNA; note = 1125 Primer Binding Sequence
aataattctttaaagatgcagagtttactaaaactttattttactgggaaaatagaataaaagttgaacaatagaaaaatggatttcttacgtgcatctcgacgaaacacacccctggaataagccgagctaaagagaaaaagaagggaaataaaggttacccacttcattgtgccaaaggcgtgtggggttgacagaagagaaaagctaggacaaacggaggga

SEQ ID NO: 994 - DNA, 225 bp, Homo sapiens
  source 1..225: mol_type = other DNA; note = 1126 Primer Binding Sequence
cagagtttactaaaactttattttactgggaaaatagaataaaagttgaacaatagaaaaatggatttcttacgtgcatctcgacgaaacacacccctggaataagccgagctaaagagaaaaagaagggaaataaaggttacccacttcattgtgccaaaggcgtgtggggttgacagaagagaaaagctaggacaaacggagggaaattagcactaatatact

SEQ ID NO: 995 - DNA, 225 bp, Homo sapiens
  source 1..225: mol_type = other DNA; note = 1127 Primer Binding Sequence
aactttattttactgggaaaatagaataaaagttgaacaatagaaaaatggatttcttacgtgcatctcgacgaaacacacccctggaataagccgagctaaagagaaaaagaagggaaataaaggttacccacttcattgtgccaaaggcgtgtggggttgacagaagagaaaagctaggacaaacggagggaaattagcactaatatacttctttaaccaata

SEQ ID NO: 996 - DNA, 225 bp, Homo sapiens
  source 1..225: mol_type = other DNA; note = 1128 Primer Binding Sequence
ctgggaaaatagaataaaagttgaacaatagaaaaatggatttcttacgtgcatctcgacgaaacacacccctggaataagccgagctaaagagaaaaagaagggaaataaaggttacccacttcattgtgccaaaggcgtgtggggttgacagaagagaaaagctaggacaaacggagggaaattagcactaatatacttctttaaccaataattgtagattat

SEQ ID NO: 997 - DNA, 225 bp, Homo sapiens
  source 1..225: mol_type = other DNA; note = 1129 Primer Binding Sequence
agaaaaatggatttcttacgtgcatctcgacgaaacacacccctggaataagccgagctaaagagaaaaagaagggaaataaaggttacccacttcattgtgccaaaggcgtgtggggttgacagaagagaaaagctaggacaaacggagggaaattagcactaatatacttctttaaccaataattgtagattattaactagactcatctttgtatttcattgg

SEQ ID NO: 998 - DNA, 225 bp, Homo sapiens
  source 1..225: mol_type = other DNA; note = 1130 Primer Binding Sequence
aatggatttcttacgtgcatctcgacgaaacacacccctggaataagccgagctaaagagaaaaagaagggaaataaaggttacccacttcattgtgccaaaggcgtgtggggttgacagaagagaaaagctaggacaaacggagggaaattagcactaatatacttctttaaccaataattgtagattattaactagactcatctttgtatttcattggctgcc

SEQ ID NO: 999 - DNA, 225 bp, Homo sapiens
  source 1..225: mol_type = other DNA; note = 1131 Primer Binding Sequence
tttcttacgtgcatctcgacgaaacacacccctggaataagccgagctaaagagaaaaagaagggaaataaaggttacccacttcattgtgccaaaggcgtgtggggttgacagaagagaaaagctaggacaaacggagggaaattagcactaatatacttctttaaccaataattgtagattattaactagactcatctttgtatttcattggctgccaaccga

SEQ ID NO: 1000 - DNA, 225 bp, Homo sapiens
  source 1..225: mol_type = other DNA; note = 1132 Primer Binding Sequence
gcatctcgacgaaacacacccctggaataagccgagctaaagagaaaaagaagggaaataaaggttacccacttcattgtgccaaaggcgtgtggggttgacagaagagaaaagctaggacaaacggagggaaattagcactaatatacttctttaaccaataattgtagattattaactagactcatctttgtatttcattggctgccaaccgattacaaaatt

SEQ ID NO: 1001 - DNA, 225 bp, Homo sapiens
  source 1..225: mol_type = other DNA; note = 1133 Primer Binding Sequence
cctggaataagccgagctaaagagaaaaagaagggaaataaaggttacccacttcattgtgccaaaggcgtgtggggttgacagaagagaaaagctaggacaaacggagggaaattagcactaatatacttctttaaccaataattgtagattattaactagactcatctttgtatttcattggctgccaaccgattacaaaattcataatattcttgccaaaaa

SEQ ID NO: 1002 - DNA, 225 bp, Homo sapiens
  source 1..225: mol_type = other DNA; note = 1134 Primer Binding Sequence
agagaaaaagaagggaaataaaggttacccacttcattgtgccaaaggcgtgtggggttgacagaagagaaaagctaggacaaacggagggaaattagcactaatatacttctttaaccaataattgtagattattaactagactcatctttgtatttcattggctgccaaccgattacaaaattcataatattcttgccaaaaaattgtttgactaaatccctt

SEQ ID NO: 1003 - DNA, 225 bp, Homo sapiens
  source 1..225: mol_type = other DNA; note = 1135 Primer Binding Sequence
caaaggcgtgtggggttgacagaagagaaaagctaggacaaacggagggaaattagcactaatatacttctttaaccaataattgtagattattaactagactcatctttgtatttcattggctgccaaccgattacaaaattcataatattcttgccaaaaaattgtttgactaaatcccttgtgtatatttaccatctggaactgttttctccacaagacctt

SEQ ID NO: 1004 - DNA, 225 bp, Homo sapiens
  source 1..225: mol_type = other DNA; note = 1136 Primer Binding Sequence
aaagctaggacaaacggagggaaattagcactaatatacttctttaaccaataattgtagattattaactagactcatctttgtatttcattggctgccaaccgattacaaaattcataatattcttgccaaaaaattgtttgactaaatcccttgtgtatatttaccatctggaactgttttctccacaagaccttgtcaatgtattaaagttgtgtaaaacat

SEQ ID NO: 1005 - DNA, 225 bp, Homo sapiens
  source 1..225: mol_type = other DNA; note = 1137 Primer Binding Sequence
ctcatctttgtatttcattggctgccaaccgattacaaaattcataatattcttgccaaaaaattgtttgactaaatcccttgtgtatatttaccatctggaactgttttctccacaagaccttgtcaatgtattaaagttgtgtaaaacatcttatcaaattttacataagagtttaaacgatttgtaccttttattcattaccatggtatttaactgtaattt

SEQ ID NO: 1006 - DNA, 225 bp, Homo sapiens
  source 1..225: mol_type = other DNA; note = 1138 Primer Binding Sequence
ttcataatattcttgccaaaaaattgtttgactaaatcccttgtgtatatttaccatctggaactgttttctccacaagaccttgtcaatgtattaaagttgtgtaaaacatcttatcaaattttacataagagtttaaacgatttgtaccttttattcattaccatggtatttaactgtaatttcccacttgaacattttagttcttggtgtttgcaatttagt

SEQ ID NO: 1007 - DNA, 225 bp, Homo sapiens
  source 1..225: mol_type = other DNA; note = 1139 Primer Binding Sequence
ctaccctctcccagaacctgagctgctctgacgcggccgtctggtgcgtttcactgatcctggtgctgcagcttccttacacttcccaagaggagaagcagtttggaaaaacaaaatcagaataagttggtcctgagttctaactttggctcttcacctttctagtccccaatttatattgttcctccgtgcgtcagttttacctgtgagataaggccagtagcc

SEQ ID NO: 1008 - DNA, 225 bp, Homo sapiens
  source 1..225: mol_type = other DNA; note = 1140 Primer Binding Sequence
tctggtgcgtttcactgatcctggtgctgcagcttccttacacttcccaagaggagaagcagtttggaaaaacaaaatcagaataagttggtcctgagttctaactttggctcttcacctttctagtccccaatttatattgttcctccgtgcgtcagttttacctgtgagataaggccagtagccagccccgtcctggcagggctgtggtgaggaggggggtgt

SEQ ID NO: 1009 - DNA, 225 bp, Mus sp.
  source 1..225: mol_type = other DNA; note = 1141 Primer Binding Sequence
gaccatgctatactaaaaattaaaagtgtgtgttactaattttataaatggagtttccatttatatttacctttatttcttatttaccattgtcttagtagatatttacaaacatgacagaaacactaaatcttgagtttgaatgcacagatataaacacttaacgggttttaaaaataataatgttggtgaaaaaatataactttgagtgtagcagagaggaac

SEQ ID NO: 1010 - DNA, 225 bp, Mus sp.
  source 1..225: mol_type = other DNA; note = 1142 Primer Binding Sequence
aaattaaaagtgtgtgttactaattttataaatggagtttccatttatatttacctttatttcttatttaccattgtcttagtagatatttacaaacatgacagaaacactaaatcttgagtttgaatgcacagatataaacacttaacgggttttaaaaataataatgttggtgaaaaaatataactttgagtgtagcagagaggaaccattgccaccttcaga

SEQ ID NO: 1011 - DNA, 225 bp, Mus sp.
  source 1..225: mol_type = other DNA; note = 1143 Primer Binding Sequence
tataaatggagtttccatttatatttacctttatttcttatttaccattgtcttagtagatatttacaaacatgacagaaacactaaatcttgagtttgaatgcacagatataaacacttaacgggttttaaaaataataatgttggtgaaaaaatataactttgagtgtagcagagaggaaccattgccaccttcagattttcctgtaacgatcgggaactggc

SEQ ID NO: 1012 - DNA, 225 bp, Mus sp.
  source 1..225: mol_type = other DNA; note = 1144 Primer Binding Sequence
ttatatttacctttatttcttatttaccattgtcttagtagatatttacaaacatgacagaaacactaaatcttgagtttgaatgcacagatataaacacttaacgggttttaaaaataataatgttggtgaaaaaatataactttgagtgtagcagagaggaaccattgccaccttcagattttcctgtaacgatcgggaactggcatcttcagggagtagctt

SEQ ID NO: 1013 - DNA, 225 bp, Mus sp.
  source 1..225: mol_type = other DNA; note = 1145 Primer Binding Sequence
attgtcttagtagatatttacaaacatgacagaaacactaaatcttgagtttgaatgcacagatataaacacttaacgggttttaaaaataataatgttggtgaaaaaatataactttgagtgtagcagagaggaaccattgccaccttcagattttcctgtaacgatcgggaactggcatcttcagggagtagcttaggtcagtgaagagaagaacaaaaagca

SEQ ID NO: 1014 - DNA, 225 bp, Mus sp.
  source 1..225: mol_type = other DNA; note = 1146 Primer Binding Sequence
tgacagaaacactaaatcttgagtttgaatgcacagatataaacacttaacgggttttaaaaataataatgttggtgaaaaaatataactttgagtgtagcagagaggaaccattgccaccttcagattttcctgtaacgatcgggaactggcatcttcagggagtagcttaggtcagtgaagagaagaacaaaaagcagcatattacagttagttgtcttcatc

SEQ ID NO: 1015 - DNA, 225 bp, Mus sp.
  source 1..225: mol_type = other DNA; note = 1147 Primer Binding Sequence
agtgtagcagagaggaaccattgccaccttcagattttcctgtaacgatcgggaactggcatcttcagggagtagcttaggtcagtgaagagaagaacaaaaagcagcatattacagttagttgtcttcatcaatctttaaatatgttgtgtggtttttctctccctgtttccacagacaagagtgagatcgcccatcggtataatgatttgggagaacaacatt

SEQ ID NO: 1016 - DNA, 225 bp, Mus sp.
  source 1..225: mol_type = other DNA; note = 1148 Primer Binding Sequence
accttcagattttcctgtaacgatcgggaactggcatcttcagggagtagcttaggtcagtgaagagaagaacaaaaagcagcatattacagttagttgtcttcatcaatctttaaatatgttgtgtggtttttctctccctgtttccacagacaagagtgagatcgcccatcggtataatgatttgggagaacaacatttcaaaggcctgtaagttataatgct

SEQ ID NO: 1017 - DNA, 225 bp, Mus sp.
  source 1..225: mol_type = other DNA; note = 1149 Primer Binding Sequence
gcttaggtcagtgaagagaagaacaaaaagcagcatattacagttagttgtcttcatcaatctttaaatatgttgtgtggtttttctctccctgtttccacagacaagagtgagatcgcccatcggtataatgatttgggagaacaacatttcaaaggcctgtaagttataatgctgaaagcccacttaatatttctggtagtattagttaaagttttaaaacac

SEQ ID NO: 1018 - DNA, 225 bp, Mus sp.
  source 1..225: mol_type = other DNA; note = 1150 Primer Binding Sequence
ttaggtcagtgaagagaagaacaaaaagcagcatattacagttagttgtcttcatcaatctttaaatatgttgtgtggtttttctctccctgtttccacagacaagagtgagatcgcccatcggtataatgatttgggagaacaacatttcaaaggcctgtaagttataatgctgaaagcccacttaatatttctggtagtattagttaaagttttaaaacacct

SEQ ID NO: 1019 - DNA, 225 bp, Mus sp.
  source 1..225: mol_type = other DNA; note = 1151 Primer Binding Sequence
aggtcagtgaagagaagaacaaaaagcagcatattacagttagttgtcttcatcaatctttaaatatgttgtgtggtttttctctccctgtttccacagacaagagtgagatcgcccatcggtataatgatttgggagaacaacatttcaaaggcctgtaagttataatgctgaaagcccacttaatatttctggtagtattagttaaagttttaaaacaccttt

SEQ ID NO: 1020 - DNA, 225 bp, Mus sp.
  source 1..225: mol_type = other DNA; note = 1152 Primer Binding Sequence
aaaagcagcatattacagttagttgtcttcatcaatctttaaatatgttgtgtggtttttctctccctgtttccacagacaagagtgagatcgcccatcggtataatgatttgggagaacaacatttcaaaggcctgtaagttataatgctgaaagcccacttaatatttctggtagtattagttaaagttttaaaacacctttttccaccttgagtgtgagaat

SEQ ID NO: 1021 - DNA, 225 bp, Mus sp.
  source 1..225: mol_type = other DNA; note = 1153 Primer Binding Sequence
taaatatgttgtgtggtttttctctccctgtttccacagacaagagtgagatcgcccatcggtataatgatttgggagaacaacatttcaaaggcctgtaagttataatgctgaaagcccacttaatatttctggtagtattagttaaagttttaaaacacctttttccaccttgagtgtgagaattgtagagcagtgctgtccagtagaaatgtgtgcattgac

SEQ ID NO: 1022 - DNA, 225 bp, Mus sp.
  source 1..225: mol_type = other DNA; note = 1154 Primer Binding Sequence
tgttgtgtggtttttctctccctgtttccacagacaagagtgagatcgcccatcggtataatgatttgggagaacaacatttcaaaggcctgtaagttataatgctgaaagcccacttaatatttctggtagtattagttaaagttttaaaacacctttttccaccttgagtgtgagaattgtagagcagtgctgtccagtagaaatgtgtgcattgacagaaag

SEQ ID NO: 1023 - DNA, 225 bp, Mus sp.
  source 1..225: mol_type = other DNA; note = 1155 Primer Binding Sequence
gtgagatcgcccatcggtataatgatttgggagaacaacatttcaaaggcctgtaagttataatgctgaaagcccacttaatatttctggtagtattagttaaagttttaaaacacctttttccaccttgagtgtgagaattgtagagcagtgctgtccagtagaaatgtgtgcattgacagaaagactgtggatctgtgctgagcaatgtggcagccagagatc

SEQ ID NO: 1024 - DNA, 225 bp, Mus sp.
  source 1..225: mol_type = other DNA; note = 1156 Primer Binding Sequence
gcctgtaagttataatgctgaaagcccacttaatatttctggtagtattagttaaagttttaaaacacctttttccaccttgagtgtgagaattgtagagcagtgctgtccagtagaaatgtgtgcattgacagaaagactgtggatctgtgctgagcaatgtggcagccagagatcacaaggctatcaagcactttgcacatggcaagtgtaactgagaagcac

SEQ ID NO: 1025 - DNA, 223 bp, Mus sp.
  source 1..223: mol_type = other DNA; note = 1157 Primer Binding Sequence
gtaagttataatgctgaaagcccacttaatatttctggtagtattagttaaagttttaaaacacctttttccaccttgagtgtgagaattgtagagcagtgctgtccagtagaaatgtgtgcattgacagaaagactgtggatctgtgctgagcaatgtggcagccagagatcacaaggctatcaagcactttgcacatggcaagtgtaactgagaagcacac

SEQ ID NO: 1026 - DNA, 203 bp, Mus sp.
  source 1..203: mol_type = other DNA; note = 1158 Primer Binding Sequence
cccacttaatatttctggtagtattagttaaagttttaaaacacctttttccaccttgagtgtgagaattgtagagcagtgctgtccagtagaaatgtgtgcattgacagaaagactgtggatctgtgctgagcaatgtggcagccagagatcacaaggctatcaagcactttgcacatggcaagtgtaactgagaagcacac

SEQ ID NO: 1027 - DNA, 201 bp, Mus sp.
  source 1..201: mol_type = other DNA; note = 1159 Primer Binding Sequence
cacttaatatttctggtagtattagttaaagttttaaaacacctttttccaccttgagtgtgagaattgtagagcagtgctgtccagtagaaatgtgtgcattgacagaaagactgtggatctgtgctgagcaatgtggcagccagagatcacaaggctatcaagcactttgcacatggcaagtgtaactgagaagcacac

SEQ ID NO: 1028 - DNA, 163 bp, Mus sp.
  source 1..163: mol_type = other DNA; note = 1160 Primer Binding Sequence
acacctttttccaccttgagtgtgagaattgtagagcagtgctgtccagtagaaatgtgtgcattgacagaaagactgtggatctgtgctgagcaatgtggcagccagagatcacaaggctatcaagcactttgcacatggcaagtgtaactgagaagcacac

SEQ ID NO: 1029 - DNA, 133 bp, Mus sp.
  source 1..133: mol_type = other DNA; note = 1161 Primer Binding Sequence
gtagagcagtgctgtccagtagaaatgtgtgcattgacagaaagactgtggatctgtgctgagcaatgtggcagccagagatcacaaggctatcaagcactttgcacatggcaagtgtaactgagaagcacac

SEQ ID NO: 1030 - DNA, 124 bp, Mus sp.
  source 1..124: mol_type = other DNA; note = 1162 Primer Binding Sequence
tgctgtccagtagaaatgtgtgcattgacagaaagactgtggatctgtgctgagcaatgtggcagccagagatcacaaggctatcaagcactttgcacatggcaagtgtaactgagaagcacac

SEQ ID NO: 1031 - DNA, 225 bp, Mus sp.
  source 1..225: mol_type = other DNA; note = 1163 Primer Binding Sequence
tagtgtttctgtcatgtttgtaaatatctactaagacaatggtaaataagaaataaaggtaaatataaatggaaactccatttataaaattagtaacacacacttttaatttttagtatagcatggtcgagcaggcaggccctatgagaccgtaataaattcaactgtatccaacgtaatttgagtcattctgcctagcatttttttttaattaaaagaaattta

SEQ ID NO: 1032 - DNA, 225 bp, Mus sp.
  source 1..225: mol_type = other DNA; note = 1164 Primer Binding Sequence
aaatataaatggaaactccatttataaaattagtaacacacacttttaatttttagtatagcatggtcgagcaggcaggccctatgagaccgtaataaattcaactgtatccaacgtaatttgagtcattctgcctagcatttttttttaattaaaagaaatttaaagctaagctttcaaaatcccccattattgtcatcaaagataccaaaaatatatcaataa

SEQ ID NO: 1033 - DNA, 225 bp, Mus sp.
  source 1..225: mol_type = other DNA; note = 1165 Primer Binding Sequence
agcatggtcgagcaggcaggccctatgagaccgtaataaattcaactgtatccaacgtaatttgagtcattctgcctagcatttttttttaattaaaagaaatttaaagctaagctttcaaaatcccccattattgtcatcaaagataccaaaaatatatcaataatataaccacctaagggttctcagatgcaaataatgacaataataacaacaacaacagta

SEQ ID NO: 1034 - DNA, 225 bp, Mus sp.
  source 1..225: mol_type = other DNA; note = 1166 Primer Binding Sequence
accgtaataaattcaactgtatccaacgtaatttgagtcattctgcctagcatttttttttaattaaaagaaatttaaagctaagctttcaaaatcccccattattgtcatcaaagataccaaaaatatatcaataatataaccacctaagggttctcagatgcaaataatgacaataataacaacaacaacagtaataataatctagaaatcagcactaaagga

SEQ ID NO: 1035 - DNA, 225 bp, Mus sp.
  source 1..225: mol_type = other DNA; note = 1167 Primer Binding Sequence
aattcaactgtatccaacgtaatttgagtcattctgcctagcatttttttttaattaaaagaaatttaaagctaagctttcaaaatcccccattattgtcatcaaagataccaaaaatatatcaataatataaccacctaagggttctcagatgcaaataatgacaataataacaacaacaacagtaataataatctagaaatcagcactaaaggaaaatttaac

SEQ ID NO: 1036 - DNA, 225 bp, Mus sp.
  source 1..225: mol_type = other DNA; note = 1168 Primer Binding Sequence
aaagctaagctttcaaaatcccccattattgtcatcaaagataccaaaaatatatcaataatataaccacctaagggttctcagatgcaaataatgacaataataacaacaacaacagtaataataatctagaaatcagcactaaaggaaaatttaactattttaaaataccaggcttccattactagaaaaatacaagcagagatgaaaaaacataaaactctt

SEQ ID NO: 1037 - DNA, 225 bp, Mus sp.
  source 1..225: mol_type = other DNA; note = 1169 Primer Binding Sequence
tttcaaaatcccccattattgtcatcaaagataccaaaaatatatcaataatataaccacctaagggttctcagatgcaaataatgacaataataacaacaacaacagtaataataatctagaaatcagcactaaaggaaaatttaactattttaaaataccaggcttccattactagaaaaatacaagcagagatgaaaaaacataaaactcttacgtgcttct

SEQ ID NO: 1038 - DNA, 225 bp, Mus sp.
  source 1..225: mol_type = other DNA; note = 1170 Primer Binding Sequence
catcaaagataccaaaaatatatcaataatataaccacctaagggttctcagatgcaaataatgacaataataacaacaacaacagtaataataatctagaaatcagcactaaaggaaaatttaactattttaaaataccaggcttccattactagaaaaatacaagcagagatgaaaaaacataaaactcttacgtgcttctcggcgaaacacacccctggaaa

SEQ ID NO: 1039 - DNA, 225 bp, Mus sp.
  source 1..225: mol_type = other DNA; note = 1171 Primer Binding Sequence
tcaaagataccaaaaatatatcaataatataaccacctaagggttctcagatgcaaataatgacaataataacaacaacaacagtaataataatctagaaatcagcactaaaggaaaatttaactattttaaaataccaggcttccattactagaaaaatacaagcagagatgaaaaaacataaaactcttacgtgcttctcggcgaaacacacccctggaaaaa

SEQ ID NO: 1040 - DNA, 225 bp, Mus sp.
  source 1..225: mol_type = other DNA; note = 1172 Primer Binding Sequence
ataccaaaaatatatcaataatataaccacctaagggttctcagatgcaaataatgacaataataacaacaacaacagtaataataatctagaaatcagcactaaaggaaaatttaactattttaaaataccaggcttccattactagaaaaatacaagcagagatgaaaaaacataaaactcttacgtgcttctcggcgaaacacacccctggaaaaagcagag

SEQ ID NO: 1041 - DNA, 225 bp, Mus sp.
  source 1..225: mol_type = other DNA; note = 1173 Primer Binding Sequence
aaaaatatatcaataatataaccacctaagggttctcagatgcaaataatgacaataataacaacaacaacagtaataataatctagaaatcagcactaaaggaaaatttaactattttaaaataccaggcttccattactagaaaaatacaagcagagatgaaaaaacataaaactcttacgtgcttctcggcgaaacacacccctggaaaaagcagagccgga

SEQ ID NO: 1042 - DNA, 225 bp, Mus sp.
  source 1..225: mol_type = other DNA; note = 1174 Primer Binding Sequence
atatatcaataatataaccacctaagggttctcagatgcaaataatgacaataataacaacaacaacagtaataataatctagaaatcagcactaaaggaaaatttaactattttaaaataccaggcttccattactagaaaaatacaagcagagatgaaaaaacataaaactcttacgtgcttctcggcgaaacacacccctggaaaaagcagagccggagacg

SEQ ID NO: 1043 - DNA, 225 bp, Mus sp.
  source 1..225: mol_type = other DNA; note = 1175 Primer Binding Sequence
taagggttctcagatgcaaataatgacaataataacaacaacaacagtaataataatctagaaatcagcactaaaggaaaatttaactattttaaaataccaggcttccattactagaaaaatacaagcagagatgaaaaaacataaaactcttacgtgcttctcggcgaaacacacccctggaaaaagcagagccggagacgaagaggaggaggagaaaggtta

SEQ ID NO: 1044 - DNA, 225 bp, Mus sp.
  source 1..225: mol_type = other DNA; note = 1176 Primer Binding Sequence
aataatctagaaatcagcactaaaggaaaatttaactattttaaaataccaggcttccattactagaaaaatacaagcagagatgaaaaaacataaaactcttacgtgcttctcggcgaaacacacccctggaaaaagcagagccggagacgaagaggaggaggagaaaggttacccacttcattttgccagaggctagtggggttgataggaaaggtgatctgt

SEQ ID NO: 1045 - DNA, 225 bp, Mus sp.
  source 1..225: mol_type = other DNA; note = 1177 Primer Binding Sequence
aggaaaatttaactattttaaaataccaggcttccattactagaaaaatacaagcagagatgaaaaaacataaaactcttacgtgcttctcggcgaaacacacccctggaaaaagcagagccggagacgaagaggaggaggagaaaggttacccacttcattttgccagaggctagtggggttgataggaaaggtgatctgtgtgcagaaagactcgctctaata

SEQ ID NO: 1046 - DNA, 225 bp, Mus sp.
  source 1..225: mol_type = other DNA; note = 1178 Primer Binding Sequence
aagcagagatgaaaaaacataaaactcttacgtgcttctcggcgaaacacacccctggaaaaagcagagccggagacgaagaggaggaggagaaaggttacccacttcattttgccagaggctagtggggttgataggaaaggtgatctgtgtgcagaaagactcgctctaatatacttctttaaccaataactgtagatcattaaccatacttacctcgcattt

SEQ ID NO: 1047 - DNA, 225 bp, Mus sp.
  source 1..225: mol_type = other DNA; note = 1179 Primer Binding Sequence
ataaaactcttacgtgcttctcggcgaaacacacccctggaaaaagcagagccggagacgaagaggaggaggagaaaggttacccacttcattttgccagaggctagtggggttgataggaaaggtgatctgtgtgcagaaagactcgctctaatatacttctttaaccaataactgtagatcattaaccatacttacctcgcatttcattggttcctaccccat

SEQ ID NO: 1048 - DNA, 225 bp, Mus sp.
  source 1..225: mol_type = other DNA; note = 1180 Primer Binding Sequence
ggagaaaggttacccacttcattttgccagaggctagtggggttgataggaaaggtgatctgtgtgcagaaagactcgctctaatatacttctttaaccaataactgtagatcattaaccatacttacctcgcatttcattggttcctaccccattacaaaatcataccatctttgccaaaaagttgtttgactaaatcccttgcgtatgtttgccatctggagc

SEQ ID NO: 1049 - DNA, 205 bp, Mus sp.
  source 1..205: mol_type = other DNA; note = 1181 Primer Binding Sequence
taggaaaggtgatctgtgtgcagaaagactcgctctaatatacttctttaaccaataactgtagatcattaaccatacttacctcgcatttcattggttcctaccccattacaaaatcataccatctttgccaaaaagttgtttgactaaatcccttgcgtatgtttgccatctggagctgttcccctctaaccccacccccacc

SEQ ID NO: 1050 - DNA, 164 bp, Mus sp.
  source 1..164: mol_type = other DNA; note = 1182 Primer Binding Sequence
acttctttaaccaataactgtagatcattaaccatacttacctcgcatttcattggttcctaccccattacaaaatcataccatctttgccaaaaagttgtttgactaaatcccttgcgtatgtttgccatctggagctgttcccctctaaccccacccccacc

SEQ ID NO: 1051 - DNA, 225 bp, Mus sp.
  source 1..225: mol_type = other DNA; note = 1183 Primer Binding Sequence
ggagggaaggagcgagggctcagttgggctgttttggaggcaggaagcacttgctctcccaaagtcgctctgagttgttatcagtaagggagctgcagtggagtaggcggggagaaggccgcacccttctccggaggggggaggggagtgttgcaatacctttctgggagttctctgctgcctcctggcttctgaggaccgccctgggcctgggagaatcccttc

SEQ ID NO: 1052 - DNA, 225 bp, Mus sp.
  source 1..225: mol_type = other DNA; note = 1184 Primer Binding Sequence
ggaaggagcgagggctcagttgggctgttttggaggcaggaagcacttgctctcccaaagtcgctctgagttgttatcagtaagggagctgcagtggagtaggcggggagaaggccgcacccttctccggaggggggaggggagtgttgcaatacctttctgggagttctctgctgcctcctggcttctgaggaccgccctgggcctgggagaatcccttccccc

SEQ ID NO: 1053 - DNA, 225 bp, Mus sp.
  source 1..225: mol_type = other DNA; note = 1185 Primer Binding Sequence
agcgagggctcagttgggctgttttggaggcaggaagcacttgctctcccaaagtcgctctgagttgttatcagtaagggagctgcagtggagtaggcggggagaaggccgcacccttctccggaggggggaggggagtgttgcaatacctttctgggagttctctgctgcctcctggcttctgaggaccgccctgggcctgggagaatcccttccccctcttcc

SEQ ID NO: 1054 - DNA, 225 bp, Mus sp.
  source 1..225: mol_type = other DNA; note = 1186 Primer Binding Sequence
gggctcagttgggctgttttggaggcaggaagcacttgctctcccaaagtcgctctgagttgttatcagtaagggagctgcagtggagtaggcggggagaaggccgcacccttctccggaggggggaggggagtgttgcaatacctttctgggagttctctgctgcctcctggcttctgaggaccgccctgggcctgggagaatcccttccccctcttccctcgt

SEQ ID NO: 1055 - DNA, 225 bp, Mus sp.
  source 1..225: mol_type = other DNA; note = 1187 Primer Binding Sequence
ccaaagtcgctctgagttgttatcagtaagggagctgcagtggagtaggcggggagaaggccgcacccttctccggaggggggaggggagtgttgcaatacctttctgggagttctctgctgcctcctggcttctgaggaccgccctgggcctgggagaatcccttccccctcttccctcgtgatctgcaactccagtctttctagaagatgggcgggagtcttc

SEQ ID NO: 1056 - DNA, 225 bp, Mus sp.
  source 1..225: mol_type = other DNA; note = 1188 Primer Binding Sequence
ggccgcacccttctccggaggggggaggggagtgttgcaatacctttctgggagttctctgctgcctcctggcttctgaggaccgccctgggcctgggagaatcccttccccctcttccctcgtgatctgcaactccagtctttctagaagatgggcgggagtcttctgggcaggcttaaaggctaacctggtgtgtgggcgttgtcctgcaggggaattgaaca

SEQ ID NO: 1057 - DNA, 225 bp, Mus sp.
  source 1..225: mol_type = other DNA; note = 1189 Primer Binding Sequence
gcaatacctttctgggagttctctgctgcctcctggcttctgaggaccgccctgggcctgggagaatcccttccccctcttccctcgtgatctgcaactccagtctttctagaagatgggcgggagtcttctgggcaggcttaaaggctaacctggtgtgtgggcgttgtcctgcaggggaattgaacaggtgtaaaattggagggacaagacttcccacagatt

SEQ ID NO: 1058 - DNA, 225 bp, Mus sp.
  source 1..225: mol_type = other DNA; note = 1190 Primer Binding Sequence
ctgcctcctggcttctgaggaccgccctgggcctgggagaatcccttccccctcttccctcgtgatctgcaactccagtctttctagaagatgggcgggagtcttctgggcaggcttaaaggctaacctggtgtgtgggcgttgtcctgcaggggaattgaacaggtgtaaaattggagggacaagacttcccacagattttcggttttgtcgggaagtttttta

SEQ ID NO: 1059 - DNA, 225 bp, Mus sp.
  source 1..225: mol_type = other DNA; note = 1191 Primer Binding Sequence
gcttctgaggaccgccctgggcctgggagaatcccttccccctcttccctcgtgatctgcaactccagtctttctagaagatgggcgggagtcttctgggcaggcttaaaggctaacctggtgtgtgggcgttgtcctgcaggggaattgaacaggtgtaaaattggagggacaagacttcccacagattttcggttttgtcgggaagttttttaataggggcaa

SEQ ID NO: 1060 - DNA, 225 bp, Mus sp.
  source 1..225: mol_type = other DNA; note = 1192 Primer Binding Sequence
gccctgggcctgggagaatcccttccccctcttccctcgtgatctgcaactccagtctttctagaagatgggcgggagtcttctgggcaggcttaaaggctaacctggtgtgtgggcgttgtcctgcaggggaattgaacaggtgtaaaattggagggacaagacttcccacagattttcggttttgtcgggaagttttttaataggggcaaataaggaaaatgg

SEQ ID NO: 1061 - DNA, 225 bp, Mus sp.
  source 1..225: mol_type = other DNA; note = 1193 Primer Binding Sequence
atcccttccccctcttccctcgtgatctgcaactccagtctttctagaagatgggcgggagtcttctgggcaggcttaaaggctaacctggtgtgtgggcgttgtcctgcaggggaattgaacaggtgtaaaattggagggacaagacttcccacagattttcggttttgtcgggaagttttttaataggggcaaataaggaaaatgggaggataggtagtcatc

SEQ ID NO: 1062 - DNA, 225 bp, Mus sp.
  source 1..225: mol_type = other DNA; note = 1194 Primer Binding Sequence
cagtctttctagaagatgggcgggagtcttctgggcaggcttaaaggctaacctggtgtgtgggcgttgtcctgcaggggaattgaacaggtgtaaaattggagggacaagacttcccacagattttcggttttgtcgggaagttttttaataggggcaaataaggaaaatgggaggataggtagtcatctggggttttatgcagcaaaactacaggttattatt

SEQ ID NO: 1063 - DNA, 225 bp, Mus sp.
  source 1..225: mol_type = other DNA; note = 1195 Primer Binding Sequence
agtcttctgggcaggcttaaaggctaacctggtgtgtgggcgttgtcctgcaggggaattgaacaggtgtaaaattggagggacaagacttcccacagattttcggttttgtcgggaagttttttaataggggcaaataaggaaaatgggaggataggtagtcatctggggttttatgcagcaaaactacaggttattattgcttgtgatccgcctcggagtatt

SEQ ID NO: 1064 - DNA, 225 bp, Mus sp.
  source 1..225: mol_type = other DNA; note = 1196 Primer Binding Sequence
catcttctagaaagactggagttgcagatcacgagggaagagggggaagggattctcccaggcccagggcggtcctcagaagccaggaggcagcagagaactcccagaaaggtattgcaacactcccctcccccctccggagaagggtgcggccttctccccgcctactccactgcagctcccttactgataacaactcagagcgactttgggagagcaagtgct

SEQ ID NO: 1065 - DNA, 225 bp, Mus sp.
  source 1..225: mol_type = other DNA; note = 1197 Primer Binding Sequence
aggggaattgaacaggtgtaaaattggagggacaagacttcccacagattttcggttttgtcgggaagttttttaataggggcaaataaggaaaatgggaggataggtagtcatctggggttttatgcagcaaaactacaggttattattgcttgtgatccgcctcggagtattttccatcgaggtagattaaagacatgctcacccgagttttatactctcctg

SEQ ID NO: 1066 - DNA, 225 bp, Mus sp.
  source 1..225: mol_type = other DNA; note = 1198 Primer Binding Sequence
ggaattgaacaggtgtaaaattggagggacaagacttcccacagattttcggttttgtcgggaagttttttaataggggcaaataaggaaaatgggaggataggtagtcatctggggttttatgcagcaaaactacaggttattattgcttgtgatccgcctcggagtattttccatcgaggtagattaaagacatgctcacccgagttttatactctcctgctt

SEQ ID NO: 1067 - DNA, 225 bp, Mus sp.
  source 1..225: mol_type = other DNA; note = 1199 Primer Binding Sequence
aacaggtgtaaaattggagggacaagacttcccacagattttcggttttgtcgggaagttttttaataggggcaaataaggaaaatgggaggataggtagtcatctggggttttatgcagcaaaactacaggttattattgcttgtgatccgcctcggagtattttccatcgaggtagattaaagacatgctcacccgagttttatactctcctgcttgagatcc

SEQ ID NO: 1068 - DNA, 225 bp, Mus sp.
  source 1..225: mol_type = other DNA; note = 1200 Primer Binding Sequence
tggagggacaagacttcccacagattttcggttttgtcgggaagttttttaataggggcaaataaggaaaatgggaggataggtagtcatctggggttttatgcagcaaaactacaggttattattgcttgtgatccgcctcggagtattttccatcgaggtagattaaagacatgctcacccgagttttatactctcctgcttgagatccttactacagtatga

SEQ ID NO: 1069 - DNA, 225 bp, Mus sp.
  source 1..225: mol_type = other DNA; note = 1201 Primer Binding Sequence
ggacaagacttcccacagattttcggttttgtcgggaagttttttaataggggcaaataaggaaaatgggaggataggtagtcatctggggttttatgcagcaaaactacaggttattattgcttgtgatccgcctcggagtattttccatcgaggtagattaaagacatgctcacccgagttttatactctcctgcttgagatccttactacagtatgaaatta

SEQ ID NO: 1070 - DNA, 225 bp, Mus sp.
  source 1..225: mol_type = other DNA; note = 1202 Primer Binding Sequence
aataggggcaaataaggaaaatgggaggataggtagtcatctggggttttatgcagcaaaactacaggttattattgcttgtgatccgcctcggagtattttccatcgaggtagattaaagacatgctcacccgagttttatactctcctgcttgagatccttactacagtatgaaattacagtgtcgcgagttagactatgtaagcagaattttaatcattttt

SEQ ID NO: 1071 - DNA, 225 bp, Mus sp.
  source 1..225: mol_type = other DNA; note = 1203 Primer Binding Sequence
taggggcaaataaggaaaatgggaggataggtagtcatctggggttttatgcagcaaaactacaggttattattgcttgtgatccgcctcggagtattttccatcgaggtagattaaagacatgctcacccgagttttatactctcctgcttgagatccttactacagtatgaaattacagtgtcgcgagttagactatgtaagcagaattttaatcatttttaa

SEQ ID NO: 1072 - DNA, 225 bp, Mus sp.
  source 1..225: mol_type = other DNA; note = 1204 Primer Binding Sequence
gggaggataggtagtcatctggggttttatgcagcaaaactacaggttattattgcttgtgatccgcctcggagtattttccatcgaggtagattaaagacatgctcacccgagttttatactctcctgcttgagatccttactacagtatgaaattacagtgtcgcgagttagactatgtaagcagaattttaatcatttttaaagagcccagtacttcatatc

SEQ ID NO: 1073 - DNA, 225 bp, Mus sp.
  source 1..225: mol_type = other DNA; note = 1205 Primer Binding Sequence
cggagtattttccatcgaggtagattaaagacatgctcacccgagttttatactctcctgcttgagatccttactacagtatgaaattacagtgtcgcgagttagactatgtaagcagaattttaatcatttttaaagagcccagtacttcatatccatttctcccgctccttctgcagccttatcaaaaggtattttagaacactcattttagccccattttca

SEQ ID NO: 1074 - DNA, 225 bp, Mus sp.
  source 1..225: mol_type = other DNA; note = 1206 Primer Binding Sequence
gaggtagattaaagacatgctcacccgagttttatactctcctgcttgagatccttactacagtatgaaattacagtgtcgcgagttagactatgtaagcagaattttaatcatttttaaagagcccagtacttcatatccatttctcccgctccttctgcagccttatcaaaaggtattttagaacactcattttagccccattttcatttattatactggctt

SEQ ID NO: 1075 - DNA, 225 bp, Mus sp.
  source 1..225: mol_type = other DNA; note = 1207 Primer Binding Sequence
cccgagttttatactctcctgcttgagatccttactacagtatgaaattacagtgtcgcgagttagactatgtaagcagaattttaatcatttttaaagagcccagtacttcatatccatttctcccgctccttctgcagccttatcaaaaggtattttagaacactcattttagccccattttcatttattatactggcttatccaacccctagacagagcatt

SEQ ID NO: 1076 - DNA, 225 bp, Mus sp.
  source 1..225: mol_type = other DNA; note = 1208 Primer Binding Sequence
cttactacagtatgaaattacagtgtcgcgagttagactatgtaagcagaattttaatcatttttaaagagcccagtacttcatatccatttctcccgctccttctgcagccttatcaaaaggtattttagaacactcattttagccccattttcatttattatactggcttatccaacccctagacagagcattggcattttccctttcctgatcttagaagtc

SEQ ID NO: 1077 - DNA, 225 bp, Mus sp.
  source 1..225: mol_type = other DNA; note = 1209 Primer Binding Sequence
tactacagtatgaaattacagtgtcgcgagttagactatgtaagcagaattttaatcatttttaaagagcccagtacttcatatccatttctcccgctccttctgcagccttatcaaaaggtattttagaacactcattttagccccattttcatttattatactggcttatccaacccctagacagagcattggcattttccctttcctgatcttagaagtctg

SEQ ID NO: 1078 - DNA, 225 bp, Mus sp.
  source 1..225: mol_type = other DNA; note = 1210 Primer Binding Sequence
ctacagtatgaaattacagtgtcgcgagttagactatgtaagcagaattttaatcatttttaaagagcccagtacttcatatccatttctcccgctccttctgcagccttatcaaaaggtattttagaacactcattttagccccattttcatttattatactggcttatccaacccctagacagagcattggcattttccctttcctgatcttagaagtctgat

SEQ ID NO: 1079 - DNA, 225 bp, Mus sp.
  source 1..225: mol_type = other DNA; note = 1211 Primer Binding Sequence
tatgaaattacagtgtcgcgagttagactatgtaagcagaattttaatcatttttaaagagcccagtacttcatatccatttctcccgctccttctgcagccttatcaaaaggtattttagaacactcattttagccccattttcatttattatactggcttatccaacccctagacagagcattggcattttccctttcctgatcttagaagtctgatgactca

SEQ ID NO: 1080 - DNA, 225 bp, Mus sp.
  source 1..225: mol_type = other DNA; note = 1212 Primer Binding Sequence
gaaattacagtgtcgcgagttagactatgtaagcagaattttaatcatttttaaagagcccagtacttcatatccatttctcccgctccttctgcagccttatcaaaaggtattttagaacactcattttagccccattttcatttattatactggcttatccaacccctagacagagcattggcattttccctttcctgatcttagaagtctgatgactcatga

SEQ ID NO: 1081 - DNA, 225 bp, Mus sp.
  source 1..225: mol_type = other DNA; note = 1213 Primer Binding Sequence
gactatgtaagcagaattttaatcatttttaaagagcccagtacttcatatccatttctcccgctccttctgcagccttatcaaaaggtattttagaacactcattttagccccattttcatttattatactggcttatccaacccctagacagagcattggcattttccctttcctgatcttagaagtctgatgactcatgaaaccagacagattagttacata

SEQ ID NO: 1082 - DNA, 225 bp, Mus sp.
  source 1..225: mol_type = other DNA; note = 1214 Primer Binding Sequence
ctatgtaagcagaattttaatcatttttaaagagcccagtacttcatatccatttctcccgctccttctgcagccttatcaaaaggtattttagaacactcattttagccccattttcatttattatactggcttatccaacccctagacagagcattggcattttccctttcctgatcttagaagtctgatgactcatgaaaccagacagattagttacataca

SEQ ID NO: 1083 - DNA, 225 bp, Mus sp.
  source 1..225: mol_type = other DNA; note = 1215 Primer Binding Sequence
agtacttcatatccatttctcccgctccttctgcagccttatcaaaaggtattttagaacactcattttagccccattttcatttattatactggcttatccaacccctagacagagcattggcattttccctttcctgatcttagaagtctgatgactcatgaaaccagacagattagttacatacaccacaaatcgaggctgtagctggggcctcaacactgc

SEQ ID NO: 1084 - DNA, 225 bp, Mus sp.
  source 1..225: mol_type = other DNA; note = 1216 Primer Binding Sequence
ttcatatccatttctcccgctccttctgcagccttatcaaaaggtattttagaacactcattttagccccattttcatttattatactggcttatccaacccctagacagagcattggcattttccctttcctgatcttagaagtctgatgactcatgaaaccagacagattagttacatacaccacaaatcgaggctgtagctggggcctcaacactgcagttc

SEQ ID NO: 1085 - DNA, 225 bp, Mus sp.
  source 1..225: mol_type = other DNA; note = 1217 Primer Binding Sequence
catttctcccgctccttctgcagccttatcaaaaggtattttagaacactcattttagccccattttcatttattatactggcttatccaacccctagacagagcattggcattttccctttcctgatcttagaagtctgatgactcatgaaaccagacagattagttacatacaccacaaatcgaggctgtagctggggcctcaacactgcagttcttttataa

SEQ ID NO: 1086 - DNA, 225 bp, Mus sp.
  source 1..225: mol_type = other DNA; note = 1218 Primer Binding Sequence
tttagaacactcattttagccccattttcatttattatactggcttatccaacccctagacagagcattggcattttccctttcctgatcttagaagtctgatgactcatgaaaccagacagattagttacatacaccacaaatcgaggctgtagctggggcctcaacactgcagttcttttataactccttagtacactttttgttgatcctttgccttgatcc

SEQ ID NO: 1087 - DNA, 225 bp, Mus sp.
  source 1..225: mol_type = other DNA; note = 1219 Primer Binding Sequence
agaacactcattttagccccattttcatttattatactggcttatccaacccctagacagagcattggcattttccctttcctgatcttagaagtctgatgactcatgaaaccagacagattagttacatacaccacaaatcgaggctgtagctggggcctcaacactgcagttcttttataactccttagtacactttttgttgatcctttgccttgatcctta

SEQ ID NO: 1088 - DNA, 225 bp, Mus sp.
  source 1..225: mol_type = other DNA; note = 1220 Primer Binding Sequence
ttttagccccattttcatttattatactggcttatccaacccctagacagagcattggcattttccctttcctgatcttagaagtctgatgactcatgaaaccagacagattagttacatacaccacaaatcgaggctgtagctggggcctcaacactgcagttcttttataactccttagtacactttttgttgatcctttgccttgatccttaattttcagtg

SEQ ID NO: 1089 - DNA, 225 bp, Mus sp.
  source 1..225: mol_type = other DNA; note = 1221 Primer Binding Sequence
tatactggcttatccaacccctagacagagcattggcattttccctttcctgatcttagaagtctgatgactcatgaaaccagacagattagttacatacaccacaaatcgaggctgtagctggggcctcaacactgcagttcttttataactccttagtacactttttgttgatcctttgccttgatccttaattttcagtgtctatcacctctcccgtcaggt

SEQ ID NO: 1090 - DNA, 225 bp, Mus sp.
  source 1..225: mol_type = other DNA; note = 1222 Primer Binding Sequence
ccaacccctagacagagcattggcattttccctttcctgatcttagaagtctgatgactcatgaaaccagacagattagttacatacaccacaaatcgaggctgtagctggggcctcaacactgcagttcttttataactccttagtacactttttgttgatcctttgccttgatccttaattttcagtgtctatcacctctcccgtcaggtggtgttccacatt

SEQ ID NO: 1091 - DNA, 225 bp, Mus sp.
  source 1..225: mol_type = other DNA; note = 1223 Primer Binding Sequence
agcattggcattttccctttcctgatcttagaagtctgatgactcatgaaaccagacagattagttacatacaccacaaatcgaggctgtagctggggcctcaacactgcagttcttttataactccttagtacactttttgttgatcctttgccttgatccttaattttcagtgtctatcacctctcccgtcaggtggtgttccacatttgggcctattctcag

SEQ ID NO: 1092 - DNA, 225 bp, Mus sp.
  source 1..225: mol_type = other DNA; note = 1224 Primer Binding Sequence
cctttcctgatcttagaagtctgatgactcatgaaaccagacagattagttacatacaccacaaatcgaggctgtagctggggcctcaacactgcagttcttttataactccttagtacactttttgttgatcctttgccttgatccttaattttcagtgtctatcacctctcccgtcaggtggtgttccacatttgggcctattctcagtccagggagttttac

SEQ ID NO: 1093 - DNA, 225 bp, Mus sp.
  source 1..225: mol_type = other DNA; note = 1225 Primer Binding Sequence
cacaaatcgaggctgtagctggggcctcaacactgcagttcttttataactccttagtacactttttgttgatcctttgccttgatccttaattttcagtgtctatcacctctcccgtcaggtggtgttccacatttgggcctattctcagtccagggagttttacaacaatagatgtattgagaatccaacctaaagcttaactttccactcccatgaatgcct

SEQ ID NO: 1094 - DNA, 225 bp, Mus sp.
  source 1..225: mol_type = other DNA; note = 1226 Primer Binding Sequence
tgtagctggggcctcaacactgcagttcttttataactccttagtacactttttgttgatcctttgccttgatccttaattttcagtgtctatcacctctcccgtcaggtggtgttccacatttgggcctattctcagtccagggagttttacaacaatagatgtattgagaatccaacctaaagcttaactttccactcccatgaatgcctctctcctttttct

SEQ ID NO: 1095 - DNA, 225 bp, Mus sp.
  source 1..225: mol_type = other DNA; note = 1227 Primer Binding Sequence
tagctggggcctcaacactgcagttcttttataactccttagtacactttttgttgatcctttgccttgatccttaattttcagtgtctatcacctctcccgtcaggtggtgttccacatttgggcctattctcagtccagggagttttacaacaatagatgtattgagaatccaacctaaagcttaactttccactcccatgaatgcctctctcctttttctcc

SEQ ID NO: 1096 - DNA, 225 bp, Mus sp.
  source 1..225: mol_type = other DNA; note = 1228 Primer Binding Sequence
ggcctcaacactgcagttcttttataactccttagtacactttttgttgatcctttgccttgatccttaattttcagtgtctatcacctctcccgtcaggtggtgttccacatttgggcctattctcagtccagggagttttacaacaatagatgtattgagaatccaacctaaagcttaactttccactcccatgaatgcctctctcctttttctccatttata

SEQ ID NO: 1097 - DNA, 225 bp, Mus sp.
  source 1..225: mol_type = other DNA; note = 1229 Primer Binding Sequence
ctgcagttcttttataactccttagtacactttttgttgatcctttgccttgatccttaattttcagtgtctatcacctctcccgtcaggtggtgttccacatttgggcctattctcagtccagggagttttacaacaatagatgtattgagaatccaacctaaagcttaactttccactcccatgaatgcctctctcctttttctccatttataaactgagcta

SEQ ID NO: 1098 - DNA, 225 bp, Mus sp.
  source 1..225: mol_type = other DNA; note = 1230 Primer Binding Sequence
tgttgatcctttgccttgatccttaattttcagtgtctatcacctctcccgtcaggtggtgttccacatttgggcctattctcagtccagggagttttacaacaatagatgtattgagaatccaacctaaagcttaactttccactcccatgaatgcctctctcctttttctccatttataaactgagctattaaccattaatggtttccaggtggatgtctcct

SEQ ID NO: 1099 - DNA, 225 bp, Mus sp.
  source 1..225: mol_type = other DNA; note = 1231 Primer Binding Sequence
cccgtcaggtggtgttccacatttgggcctattctcagtccagggagttttacaacaatagatgtattgagaatccaacctaaagcttaactttccactcccatgaatgcctctctcctttttctccatttataaactgagctattaaccattaatggtttccaggtggatgtctcctcccccaatattacctgatgtatcttacatattgccaggctgatattt

SEQ ID NO: 1100 - DNA, 225 bp, Mus sp.
  source 1..225: mol_type = other DNA; note = 1232 Primer Binding Sequence
tataaactgagctattaaccattaatggtttccaggtggatgtctcctcccccaatattacctgatgtatcttacatattgccaggctgatattttaagacattaaaaggtatatttcattattgagccacatggtattgattactgcttactaaaattttgtcattgtacacatctgtaaaaggtggttccttttggaatgcaaagttcaggtgtttgttgtct

SEQ ID NO: 1101 - DNA, 225 bp, Mus sp.
  source 1..225: mol_type = other DNA; note = 1233 Primer Binding Sequence
tggtttccaggtggatgtctcctcccccaatattacctgatgtatcttacatattgccaggctgatattttaagacattaaaaggtatatttcattattgagccacatggtattgattactgcttactaaaattttgtcattgtacacatctgtaaaaggtggttccttttggaatgcaaagttcaggtgtttgttgtctttcctgacctaaggtcttgtgagct

SEQ ID NO: 1102 - DNA, 225 bp, Mus sp.
  source 1..225: mol_type = other DNA; note = 1234 Primer Binding Sequence
cccccaatattacctgatgtatcttacatattgccaggctgatattttaagacattaaaaggtatatttcattattgagccacatggtattgattactgcttactaaaattttgtcattgtacacatctgtaaaaggtggttccttttggaatgcaaagttcaggtgtttgttgtctttcctgacctaaggtcttgtgagcttgtattttttctatttaagcagt

SEQ ID NO: 1103 - DNA, 225 bp, Mus sp.
  source 1..225: mol_type = other DNA; note = 1235 Primer Binding Sequence
ctctttaaaaatgattaaaattctgcttacatagtctaactcgcgacactgtaatttcatactgtagtaaggatctcaagcaggagagtataaaactcgggtgagcatgtctttaatctacctcgatggaaaatactccgaggcggatcacaagcaataataacctgtagttttgctgcataaaaccccagatgactacctatcctcccattttccttatttgcc

SEQ ID NO: 1104 - DNA, 225 bp, Mus sp.
  source 1..225: mol_type = other DNA; note = 1236 Primer Binding Sequence
ctttaaaaatgattaaaattctgcttacatagtctaactcgcgacactgtaatttcatactgtagtaaggatctcaagcaggagagtataaaactcgggtgagcatgtctttaatctacctcgatggaaaatactccgaggcggatcacaagcaataataacctgtagttttgctgcataaaaccccagatgactacctatcctcccattttccttatttgcccc

SEQ ID NO: 1105 - DNA, 225 bp, Mus sp.
  source 1..225: mol_type = other DNA; note = 1237 Primer Binding Sequence
gattaaaattctgcttacatagtctaactcgcgacactgtaatttcatactgtagtaaggatctcaagcaggagagtataaaactcgggtgagcatgtctttaatctacctcgatggaaaatactccgaggcggatcacaagcaataataacctgtagttttgctgcataaaaccccagatgactacctatcctcccattttccttatttgcccctattaaaaaa

SEQ ID NO: 1106 - DNA, 225 bp, Mus sp.
  source 1..225: mol_type = other DNA; note = 1238 Primer Binding Sequence
catagtctaactcgcgacactgtaatttcatactgtagtaaggatctcaagcaggagagtataaaactcgggtgagcatgtctttaatctacctcgatggaaaatactccgaggcggatcacaagcaataataacctgtagttttgctgcataaaaccccagatgactacctatcctcccattttccttatttgcccctattaaaaaacttcccgacaaaaccga

SEQ ID NO: 1107 - DNA, 225 bp, Mus sp.
  source 1..225: mol_type = other DNA; note = 1239 Primer Binding Sequence
tagtctaactcgcgacactgtaatttcatactgtagtaaggatctcaagcaggagagtataaaactcgggtgagcatgtctttaatctacctcgatggaaaatactccgaggcggatcacaagcaataataacctgtagttttgctgcataaaaccccagatgactacctatcctcccattttccttatttgcccctattaaaaaacttcccgacaaaaccgaaa

SEQ ID NO: 1108 - DNA, 225 bp, Mus sp.
  source 1..225: mol_type = other DNA; note = 1240 Primer Binding Sequence
tactgtagtaaggatctcaagcaggagagtataaaactcgggtgagcatgtctttaatctacctcgatggaaaatactccgaggcggatcacaagcaataataacctgtagttttgctgcataaaaccccagatgactacctatcctcccattttccttatttgcccctattaaaaaacttcccgacaaaaccgaaaatctgtgggaagtcttgtccctccaatt

SEQ ID NO: 1109 - DNA, 225 bp, Mus sp.
  source 1..225: mol_type = other DNA; note = 1241 Primer Binding Sequence
tgtagtaaggatctcaagcaggagagtataaaactcgggtgagcatgtctttaatctacctcgatggaaaatactccgaggcggatcacaagcaataataacctgtagttttgctgcataaaaccccagatgactacctatcctcccattttccttatttgcccctattaaaaaacttcccgacaaaaccgaaaatctgtgggaagtcttgtccctccaatttta

SEQ ID NO: 1110 - DNA, 225 bp, Mus sp.
  source 1..225: mol_type = other DNA; note = 1242 Primer Binding Sequence
tagtaaggatctcaagcaggagagtataaaactcgggtgagcatgtctttaatctacctcgatggaaaatactccgaggcggatcacaagcaataataacctgtagttttgctgcataaaaccccagatgactacctatcctcccattttccttatttgcccctattaaaaaacttcccgacaaaaccgaaaatctgtgggaagtcttgtccctccaattttaca

SEQ ID NO: 1111 - DNA, 225 bp, Mus sp.
  source 1..225: mol_type = other DNA; note = 1243 Primer Binding Sequence
aaggatctcaagcaggagagtataaaactcgggtgagcatgtctttaatctacctcgatggaaaatactccgaggcggatcacaagcaataataacctgtagttttgctgcataaaaccccagatgactacctatcctcccattttccttatttgcccctattaaaaaacttcccgacaaaaccgaaaatctgtgggaagtcttgtccctccaattttacacctg

SEQ ID NO: 1112 - DNA, 225 bp, Mus sp.
  source 1..225: mol_type = other DNA; note = 1244 Primer Binding Sequence
agagtataaaactcgggtgagcatgtctttaatctacctcgatggaaaatactccgaggcggatcacaagcaataataacctgtagttttgctgcataaaaccccagatgactacctatcctcccattttccttatttgcccctattaaaaaacttcccgacaaaaccgaaaatctgtgggaagtcttgtccctccaattttacacctgttcaattcccctgcag

SEQ ID NO: 1113 - DNA, 225 bp, Mus sp.
  source 1..225: mol_type = other DNA; note = 1245 Primer Binding Sequence
aactcgggtgagcatgtctttaatctacctcgatggaaaatactccgaggcggatcacaagcaataataacctgtagttttgctgcataaaaccccagatgactacctatcctcccattttccttatttgcccctattaaaaaacttcccgacaaaaccgaaaatctgtgggaagtcttgtccctccaattttacacctgttcaattcccctgcaggacaacgcc

SEQ ID NO: 1114 - DNA, 225 bp, Mus sp.
  source 1..225: mol_type = other DNA; note = 1246 Primer Binding Sequence
cgaggcggatcacaagcaataataacctgtagttttgctgcataaaaccccagatgactacctatcctcccattttccttatttgcccctattaaaaaacttcccgacaaaaccgaaaatctgtgggaagtcttgtccctccaattttacacctgttcaattcccctgcaggacaacgcccacacaccaggttagcctttaagcctgcccagaagactcccgccc

SEQ ID NO: 1115 - DNA, 225 bp, Mus sp.
  source 1..225: mol_type = other DNA; note = 1247 Primer Binding Sequence
atcacaagcaataataacctgtagttttgctgcataaaaccccagatgactacctatcctcccattttccttatttgcccctattaaaaaacttcccgacaaaaccgaaaatctgtgggaagtcttgtccctccaattttacacctgttcaattcccctgcaggacaacgcccacacaccaggttagcctttaagcctgcccagaagactcccgcccatcttcta

SEQ ID NO: 1116 - DNA, 225 bp, Mus sp.
  source 1..225: mol_type = other DNA; note = 1248 Primer Binding Sequence
ataacctgtagttttgctgcataaaaccccagatgactacctatcctcccattttccttatttgcccctattaaaaaacttcccgacaaaaccgaaaatctgtgggaagtcttgtccctccaattttacacctgttcaattcccctgcaggacaacgcccacacaccaggttagcctttaagcctgcccagaagactcccgcccatcttctagaaagactggagt

SEQ ID NO: 1117 - DNA, 225 bp, Mus sp.
  source 1..225: mol_type = other DNA; note = 1249 Primer Binding Sequence
agatgactacctatcctcccattttccttatttgcccctattaaaaaacttcccgacaaaaccgaaaatctgtgggaagtcttgtccctccaattttacacctgttcaattcccctgcaggacaacgcccacacaccaggttagcctttaagcctgcccagaagactcccgcccatcttctagaaagactggagttgcagatcacgagggaagagggggaaggga

SEQ ID NO: 1118 - DNA, 225 bp, Mus sp.
  source 1..225: mol_type = other DNA; note = 1250 Primer Binding Sequence
atgactacctatcctcccattttccttatttgcccctattaaaaaacttcccgacaaaaccgaaaatctgtgggaagtcttgtccctccaattttacacctgttcaattcccctgcaggacaacgcccacacaccaggttagcctttaagcctgcccagaagactcccgcccatcttctagaaagactggagttgcagatcacgagggaagagggggaagggatt

SEQ ID NO: 1119 - DNA, 225 bp, Mus sp.
  source 1..225: mol_type = other DNA; note = 1251 Primer Binding Sequence
aaaaccgaaaatctgtgggaagtcttgtccctccaattttacacctgttcaattcccctgcaggacaacgcccacacaccaggttagcctttaagcctgcccagaagactcccgcccatcttctagaaagactggagttgcagatcacgagggaagagggggaagggattctcccaggcccagggcggtcctcagaagccaggaggcagcagagaactcccagaa

SEQ ID NO: 1120 - DNA, 225 bp, Mus sp.
  source 1..225: mol_type = other DNA; note = 1252 Primer Binding Sequence
cacctgttcaattcccctgcaggacaacgcccacacaccaggttagcctttaagcctgcccagaagactcccgcccatcttctagaaagactggagttgcagatcacgagggaagagggggaagggattctcccaggcccagggcggtcctcagaagccaggaggcagcagagaactcccagaaaggtattgcaacactcccctcccccctccggagaagggtgc

SEQ ID NO: 1121 - DNA, 225 bp, Mus sp.
  source 1..225: mol_type = other DNA; note = 1253 Primer Binding Sequence
tgcaggacaacgcccacacaccaggttagcctttaagcctgcccagaagactcccgcccatcttctagaaagactggagttgcagatcacgagggaagagggggaagggattctcccaggcccagggcggtcctcagaagccaggaggcagcagagaactcccagaaaggtattgcaacactcccctcccccctccggagaagggtgcggccttctccccgccta

SEQ ID NO: 1122 - DNA, 225 bp, Mus sp.
  source 1..225: mol_type = other DNA; note = 1254 Primer Binding Sequence
cctgcccagaagactcccgcccatcttctagaaagactggagttgcagatcacgagggaagagggggaagggattctcccaggcccagggcggtcctcagaagccaggaggcagcagagaactcccagaaaggtattgcaacactcccctcccccctccggagaagggtgcggccttctccccgcctactccactgcagctcccttactgataacaactcagagc

SEQ ID NO: 1123 - DNA, 225 bp, Mus sp.
  source 1..225: mol_type = other DNA; note = 1255 Primer Binding Sequence
ctcccgcccatcttctagaaagactggagttgcagatcacgagggaagagggggaagggattctcccaggcccagggcggtcctcagaagccaggaggcagcagagaactcccagaaaggtattgcaacactcccctcccccctccggagaagggtgcggccttctccccgcctactccactgcagctcccttactgataacaactcagagcgactttgggagag

SEQ ID NO: 1124 - DNA, 225 bp, Mus sp.
  source 1..225: mol_type = other DNA; note = 1256 Primer Binding Sequence
gggcaggcttaaaggctaacctggtgtgtgggcgttgtcctgcaggggaattgaacaggtgtaaaattggagggacaagacttcccacagattttcggttttgtcgggaagttttttaataggggcaaataaggaaaatgggaggataggtagtcatctggggttttatgcagcaaaactacaggttattattgcttgtgatccgcctcggagtattttccatcg

SEQ ID NO: 1125 - DNA, 225 bp, Mus sp.
  source 1..225: mol_type = other DNA; note = 1257 Primer Binding Sequence
caggcccagggcggtcctcagaagccaggaggcagcagagaactcccagaaaggtattgcaacactcccctcccccctccggagaagggtgcggccttctccccgcctactccactgcagctcccttactgataacaactcagagcgactttgggagagcaagtgcttcctgcctccaaaacagcccaactgagccctcgctccttccctccactccccggagtg

SEQ ID NO: 1126 - DNA, 225 bp, Mus sp.
  source 1..225: mol_type = other DNA; note = 1258 Primer Binding Sequence
gcccagggcggtcctcagaagccaggaggcagcagagaactcccagaaaggtattgcaacactcccctcccccctccggagaagggtgcggccttctccccgcctactccactgcagctcccttactgataacaactcagagcgactttgggagagcaagtgcttcctgcctccaaaacagcccaactgagccctcgctccttccctccactccccggagtgcgc

SEQ ID NO: 1127 - DNA, 225 bp, Mus sp.
  source 1..225: mol_type = other DNA; note = 1259 Primer Binding Sequence
ccttctccccgcctactccactgcagctcccttactgataacaactcagagcgactttgggagagcaagtgcttcctgcctccaaaacagcccaactgagccctcgctccttccctccactccccggagtgcgcgatggaggtctggctcagcacgcccctcttgaggcaactcaagtcggaaacgtgcttgcacccgccccgcagccgctcagccctactgccc

SEQ ID NO: 1128 - DNA, 225 bp, Mus sp.
  source 1..225: mol_type = other DNA; note = 1260 Primer Binding Sequence
cccgcctactccactgcagctcccttactgataacaactcagagcgactttgggagagcaagtgcttcctgcctccaaaacagcccaactgagccctcgctccttccctccactccccggagtgcgcgatggaggtctggctcagcacgcccctcttgaggcaactcaagtcggaaacgtgcttgcacccgccccgcagccgctcagccctactgcccgtccccg

SEQ ID NO: 1129 - DNA, 225 bp, Mus sp.
  source 1..225: mol_type = other DNA; note = 1261 Primer Binding Sequence
ctactccactgcagctcccttactgataacaactcagagcgactttgggagagcaagtgcttcctgcctccaaaacagcccaactgagccctcgctccttccctccactccccggagtgcgcgatggaggtctggctcagcacgcccctcttgaggcaactcaagtcggaaacgtgcttgcacccgccccgcagccgctcagccctactgcccgtccccgccccc

SEQ ID NO: 1130 - DNA, 225 bp, Mus sp.
  source 1..225: mol_type = other DNA; note = 1262 Primer Binding Sequence
tactgataacaactcagagcgactttgggagagcaagtgcttcctgcctccaaaacagcccaactgagccctcgctccttccctccactccccggagtgcgcgatggaggtctggctcagcacgcccctcttgaggcaactcaagtcggaaacgtgcttgcacccgccccgcagccgctcagccctactgcccgtccccgcccccagcgcgcgcttcctgccacg

SEQ ID NO: 1131 - DNA, 225 bp, Mus sp.
  source 1..225: mol_type = other DNA; note = 1263 Primer Binding Sequence
gtgcttcctgcctccaaaacagcccaactgagccctcgctccttccctccactccccggagtgcgcgatggaggtctggctcagcacgcccctcttgaggcaactcaagtcggaaacgtgcttgcacccgccccgcagccgctcagccctactgcccgtccccgcccccagcgcgcgcttcctgccacgttgcgcaggggcgcgcggccagactctgcggcgcgg

SEQ ID NO: 1132 - DNA, 225 bp, Mus sp.
  source 1..225: mol_type = other DNA; note = 1264 Primer Binding Sequence
caagtcggaaacgtgcttgcacccgccccgcagccgctcagccctactgcccgtccccgcccccagcgcgcgcttcctgccacgttgcgcaggggcgcgcggccagactctgcggcgcggggccgaggggagggccggaacctgggagcgcctcctcgccgcccccgctggccggcggatggactcaacttgcacgaacacgagccaatggcaagggccagtttt

SEQ ID NO: 1133 - DNA, 225 bp, Mus sp.
  source 1..225: mol_type = other DNA; note = 1265 Primer Binding Sequence
cctgccacgttgcgcaggggcgcgcggccagactctgcggcgcggggccgaggggagggccggaacctgggagcgcctcctcgccgcccccgctggccggcggatggactcaacttgcacgaacacgagccaatggcaagggccagttttctgggccccgagagccaatcagacgacgaggcccggccggcggcgggtaaaacgactcccccagaggaaggggag

SEQ ID NO: 1134 - DNA, 225 bp, Mus sp.
  source 1..225: mol_type = other DNA; note = 1266 Primer Binding Sequence
ccggccggcggcgggtaaaacgactcccccagaggaaggggagggtgggcggccgctcgcgcgcgagctactttcgctgaccctccctcccctcccccgccccgccagaggccgaccgcgcccgcacgtccagctcgcctcaccccacctacctcccgccccacccagtgggcagagcgaggctgccggcggctgcgcactccggctgccgttaactgacaggcg

SEQ ID NO: 1135 - DNA, 225 bp, Mus sp.
  source 1..225: mol_type = other DNA; note = 1267 Primer Binding Sequence
ccctccctcccctcccccgccccgccagaggccgaccgcgcccgcacgtccagctcgcctcaccccacctacctcccgccccacccagtgggcagagcgaggctgccggcggctgcgcactccggctgccgttaactgacaggcgccttacgccaaccaaaacacgccatttgtgttttcacacacggcgggaggaaaagaagccaatcagcgacgagacgtcgg

SEQ ID NO: 1136 - DNA, 673 bp, synthetic construct
  source 1..673: mol_type = other DNA; note = chimeric promoter
ggctcagaggcacacaggagtttctgggctcaccctgcccccttccaacccctcagttcccatcctccagcagctgtttgtgtgctgcctctgaagtccacactgaacaaacttcagcctactcatgtccctaaaatgggcaaacattgcaagcagcaaacagcaaacacacagccctccctgcctgctgaccttggagctggggcagaggtcagagacctctctgggcccatgccacctccaacatccactcgaccccttggaatttcggtggagaggagcagaggttgtcctggcgtggtttaggtagtgtgagaggatcttgctaccagtggaacagccactaaggattctgcagtgagagcagagggccagctaagtggtactctcccagagactgtctgactcacgccaccccctccaccttggacacaggacgctgtggtttctgagccaggtacaatgactcctttcggtaagtgcagtggaagctgtacactgcccaggcaaagcgtccgggcagcgtaggcgggcgactcagatcccagccagtggacttagcccctgtttgctcctccgataactggggtgaccttggttaatattcaccagcagcctcccccgttgcccctctggatccactgcttaaatacggacgaggacagggccctgt

SEQ ID NO: 1137 - protein, 461 aa, Homo sapiens
  source 1..461: note = Factor IX
MQRVNMIMAESPGLITICLLGYLLSAECTVFLDHENANKILNRPKRYNSGKLEEFVQGNLERECMEEKCSFEEAREVFENTERTTEFWKQYVDGDQCESNPCLNGGSCKDDINSYECWCPFGFEGKNCELDVTCNIKNGRCEQFCKNSADNKVVCSCTEGYRLAENQKSCEPAVPFPCGRVSVSQTSKLTRAETVFPDVDYVNSTEAETILDNITQSTQSFNDFTRVVGGEDAKPGQFPWQVVLNGKVDAFCGGSIVNEKWIVTAAHCVETGVKITVVAGEHNIEETEHTEQKRNVIRIIPHHNYNAAINKYNHDIALLELDEPLVLNSYVTPICIADKEYTNIFLKFGSGYVSGWGRVFHKGRSALVLQYLRVPLVDRATCLRSTKFTIYNNMFCAGFHEGGRDSCQGDSGGPHVTEVEGTSFLTGIISWGEECAMKGKYGIYTKVSRYVNWIKEKTKLT

SEQ ID NO: 1138 - protein, 60 aa, unidentified
  source 1..60: note = MG161-8 functional domain
MPTIKFKYKGEEKEVEVEKIKKAWIVGDKMLAFLYEEGGKVKRGGLSLREAPKELLALLE

SEQ ID NO: 1139 - protein, 60 aa, unidentified
  source 1..60: note = MG161-9 functional domain
MTTIKFKYKGEEKEVELEKIKKAWIVGDKMVSFLYEEGGKVKRGGLSLREAPKELLALLE

SEQ ID NO: 1140 - protein, 60 aa, unidentified
  source 1..60: note = MG161-10 functional domain
MPTIKFKYKGEEKEVELEKIKKAWTVGNKMVSFLYEEGGKVKRGGLSLREAPKELLALLE

SEQ ID NO: 1141 - protein, 51 aa, unidentified
  source 1..51: note = MG161-12 functional domain
VYVAGNEYNGSNIIVAKYWKNGKAVSLTDGTKDASAGSDAGGGPITVVGSD

SEQ ID NO: 1142 - protein, 45 aa, unidentified
  source 1..45: note = MG161-13 functional domain
VYVAGSEKNGSNISVAKYWKNGKAVSLTDGTKSAYANSITVAGTD

SEQ ID NO: 1143 - protein, 44 aa, unidentified
  source 1..44: note = MG161-14 functional domain
VYVAGWESNGSFAVGKYWKNGQAISLTDGTNDAIAISIAVVGND

SEQ ID NO: 1144 - protein, 44 aa, unidentified
  source 1..44: note = MG161-15 functional domain
VYVAGYEQDKDRNFDPVVKYWKNGKAIALADYGVAYSIAVLGSD

SEQ ID NO: 1145 - protein, 37 aa, unidentified
  source 1..37: note = MG161-16 functional domain
VYVAGDEGYVAKYWKNGQAIALEIFASAKSIAVVGSD

SEQ ID NO: 1146 - protein, 46 aa, unidentified
  source 1..46: note = MG161-17 functional domain
VYVAGYGQNFGFLIPVAKYWKNGKAVSLTDGTSSAGAKSIAVVGSD

SEQ ID NO: 1147 - protein, 42 aa, unidentified
  source 1..42: note = MG161-18 functional domain
VFVAGVDYNESNVAKYWKNGQAISLTNGTNRAFPRSIVVVKR

SEQ ID NO: 1148 - protein, 64 aa, unidentified
  source 1..64: note = MG161-20 functional domain
MAKVKFRYKGEEKEVDISKIKKVWRVGKMISFTYDDNGKTGRGAVSEKDAPKELLDLLNKQSKK

SEQ ID NO: 1149 - protein, 64 aa, unidentified
  source 1..64: note = MG161-22 functional domain
MAKVKFRYKGEEKEVDISKIKKVWRVGKMISFTYDDNGKTGRGAVSEKDAPKELLDLLNKQAKK

SEQ ID NO: 1150 - protein, 61 aa, unidentified
  source 1..61: note = MG161-25 functional domain
MATVKFKYKGEEKEVDISKIKKVWRVGKLISFVYDDNGKNGRGAVSEKDAPAELLKMLEKK

SEQ ID NO: 1151 - protein, 60 aa, unidentified
  source 1..60: note = MG161-26 functional domain
MATVKFKYKGEEKEVDISKIKKVWRVGRLVSFIYDDNGKNGRGAVSEKDAPAELLKMLEK

SEQ ID NO: 1152 - protein, 62 aa, unidentified
  source 1..62: note = MG161-27 functional domain
MVSVKFKYKGEEKEVDISKIKKAWIVGKMVSFTYDDNGKTGRGAVSEKDAPKELLDKVATAQ

SEQ ID NO: 1153 - protein, 64 aa, unidentified
  source 1..64: note = MG161-29 functional domain
MVSVKFKYKGEEKQVDVSKIKKVWKVGKMISFTYDDNGKTGRGAVSEKDAPKELIEMLEKSGKK

SEQ ID NO: 1154 - protein, 64 aa, unidentified
  source 1..64: note = MG161-30 functional domain
MVTVKFKYKGEQKEVDISKIKKVWRVGKMISFTYDDNGKTGRGAVSEKDAPKEFLDMLENSGKK

SEQ ID NO: 1155 - protein, 64 aa, unidentified
  source 1..64: note = MG161-31 functional domain
MVTVKFKYKGEEKQVDISKIKKVWRVGKMISFTYDDNGKTGRGAVSEKDAPKELLEMLEKQQKK

SEQ ID NO: 1156 - protein, 60 aa, unidentified
  source 1..60: note = MG161-37 functional domain
MVKVKFVYKGEEKEVDISKIKKAWRVGRMISFTYDDNGKTARGAVSEKDAPKELLALVKK

SEQ ID NO: 1157 - protein, 65 aa, unidentified
  source 1..65: note = MG161-42 functional domain
MVTVKFKYKGEEKEVDVSKIKKVWRVGKMISFTYDDNGKTGRGAVSEKDAPKELLAMLEKQSKSK

SEQ ID NO: 1158 - protein, 61 aa, unidentified
  source 1..61: note = MG161-44 functional domain
MVKVKFVYKGEEKEVDVSKIKKAWRVGKMISFTYDDNGKTGRGAVSEKDAPKELLALLRKQ

SEQ ID NO: 1159 - protein, 64 aa, unidentified
  source 1..64: note = MG161-45 functional domain
MAKVKFRYKGEEKEVDISKIKKVWRVGKMISFTYDDNGKTGRGAVSEKDAPKELLDMLNKQSKK

SEQ ID NO: 1160 - protein, 65 aa, unidentified
  source 1..65: note = MG161-61 functional domain
MVTEKLKNKGEEKEVVINKIKKVWRVGKLISFTYDEGGGKTGRGAVSEKDAPKELLQMLEKQSKK

SEQ ID NO: 1161 - protein, 26 aa, unidentified
  source 1..26: note = MG161-65 functional domain
DNVVRRAVARNPNATAEALDLLARDE

SEQ ID NO: 1162 - protein, 51 aa, unidentified
  source 1..51: note = MG161-70 functional domain
TEETCEHEYVTKYDKTNHWEACSKCGEVKANSTEKHTYDENGKCKCGATKQ

SEQ ID NO: 1163 - protein, 26 aa, unidentified
  source 1..26: note = MG161-71 functional domain
DPDVRGNVARNPKAPAELLNMLARDA

SEQ ID NO: 1164 - protein, 26 aa, unidentified
  source 1..26: note = MG161-72 functional domain
DHVVRGYAGIDPHAPVELLNMLARDE

SEQ ID NO: 1165 - protein, 26 aa, unidentified
  source 1..26: note = MG161-73 functional domain
DPYVRGNVARNPNAPAELLNMLARDE

SEQ ID NO: 1166 - protein, 26 aa, unidentified
  source 1..26: note = MG161-74 functional domain
DPDVRMHAASNPNAPSELLNMLARGE

SEQ ID NO: 1167 - protein, 26 aa, unidentified
  source 1..26: note = MG161-75 functional domain
DYLVRLKVARNPNAPAEALDLLARGK

SEQ ID NO: 1168 - protein, 26 aa, unidentified
  source 1..26: note = MG161-76 functional domain
DYSVRFNVASNPNAPAELLNLLARNA

SEQ ID NO: 1169 - protein, 29 aa, unidentified
  source 1..29: note = MG161-77 functional domain
APDVRKAAVNNPNYKEDINQVQARLLLLT

SEQ ID NO: 1170 - protein, 34 aa, unidentified
  source 1..34: note = MG161-78 functional domain
MRGLDKEAAQDMKKNILKDENISLEVLSLLARDA

SEQ ID NO: 1171 - protein, 93 aa, unidentified
  source 1..93: note = MG161-79 functional domain
PNGTAANSYNSANAPSLAGAYTVTANFAGNDNYNSGSSSAVALTIGKATPIVTAVGGAFTYDGTAKAGSGSVVGVQTPAETLTPAVTFNYSGT

SEQ ID NO: 1172 - protein, 93 aa, unidentified
  source 1..93: note = MG161-80 functional domain
PNGAVANSYNSANAPTLAGTYTVTANFAGNNNYNSGSSSAVALTIGKATPVVTAVGGAFTYNGTAKAGSGSVVGVQTPAETLTPAATLSYSGT

SEQ ID NO: 1173 - protein, 83 aa, unidentified
  source 1..83: note = MG161-81 functional domain
SGNAPTLAGTYTVTASFAGNNNYNSGSSSAVALTIGKATPVVTAVGGAFTYNGTAKAGSGSVVGVQTPAETLTPAVTLNYSGT

SEQ ID NO: 1174 - protein, 62 aa, unidentified
  source 1..62: note = MG161-82 functional domain
FVSGSEPTLVQLAPGEYTLTELTAPQGYQVAETISFTVDANGLVGSDKVEMKDAPIVEEEKE

SEQ ID NO: 1175 - protein, 47 aa, unidentified
  source 1..47: note = MG161-83 functional domain
MPQSFVYHGVKIGSVLSTIRYRGNYVRDSPQRRQWLLEKGVSFTYDS

SEQ ID NO: 1176 - protein, 78 aa, unidentified
  source 1..78: note = MG161-84 functional domain
IPQSYEHQGMKIGQILMNIRHRGCFVTDNLQRKQWLLERGVILTYDSGLYLSDTTSVEKWQRYKEIFALYYADNGDLN

SEQ ID NO: 1177 - protein, 48 aa, unidentified
  source 1..48: note = MG161-85 functional domain
TCEHEYVTKYDETNHWQECSKCGFVKADSIVEHAYNENGKCECGATKS

SEQ ID NO: 1178 - protein, 48 aa, unidentified
  source 1..48: note = MG161-86 functional domain
TCEHEYVTKHNKTNHWEECSKCGEIKEDSVKEHTYDKNGKCECGETKS

SEQ ID NO: 1179 - protein, 51 aa, unidentified
  source 1..51: note = MG161-87 functional domain
TEETCEHEYVTKYDKTNHWQECSKCGFIKADSIVEHAYDENGKCECGATKK

SEQ ID NO: 1180 - protein, 51 aa, unidentified
  source 1..51: note = MG161-88 functional domain
TEETCEHEYVTKYDETDHWQECSKCGFIKANSIVEHAYDENGKCECGATKK

SEQ ID NO: 1181 - protein, 85 aa, unidentified
  source 1..85: note = MG161-89 functional domain
EISKTAVADSAELPGARLVITKKGSDEVLYQHTSTNQTWTVQLEPGEYTLTEITAPKGYEVAEAIDFTVNENGLAGGGKVHMEDA

SEQ ID NO: 1182 - protein, 99 aa, unidentified
  source 1..99: note = MG161-90 functional domain
PTPEEPKPEITEVTVNKVWDDNNNQDGKRTENVTVNLLADGTAVAKYVLNSSNNWTHTFTALPKKNAEGKDFVYTVVETEVPAGYEAAVNGFTITNKHT

SEQ ID NO: 1183 - protein, 91 aa, unidentified
  source 1..91: note = MG161-91 functional domain
PETVTITGTKTWNDADNQDGKRPASITVNLLANGTVKDSKTVTQKDNWTYTWKDLPKYENGSEIKYTVTENKVEGYQVTSDGINIINNYTP

SEQ ID NO: 1184 - protein, 94 aa, unidentified
  source 1..94: note = MG161-92 functional domain
GKTSVSVVKAWADENDKDAIRPASVSATLYADGATVDTQVLSADNGWTYTWTDLDEMKDGKTIVYTVDEAVVPEGYGKAVTENNGTFVITNTHT

SEQ ID NO: 1185 - protein, 96 aa, unidentified
  source 1..96: note = MG161-93 functional domain
PSKEEKENPTVTISKTDAATSAELPGATLIIKNKAGETVVTFVSGDEPTKFQLEPGEYTLTEVTAPKGYEVAETISFTVDANGLVGSDKVEMKDAP

SEQ ID NO: 1186 - protein, 93 aa, unidentified
  source 1..93: note = MG161-94 functional domain
IVEEENPTVTISKTDAATTAELPGATLIIRNAEGKIVESFVSGSEPTLVQLAPGEYTLTELTAPQGYQVAETISFTVDANGLVGSDKVEMKDA

SEQ ID NO: 1187 - protein, 78 aa, unidentified
  source 1..78: note = MG161-95 functional domain
MPVSYIHQGVKIGRILSTIRLQGCFVRDNPQRKQWLLERGVILTYDSGLCLSDTTSVEKWQRYKEIFSLYYAENGDLN

SEQ ID NO: 1188 - protein, 74 aa, unidentified
  source 1..74: note = MG161-96 functional domain
MSRSYECQGVKIGKVLHNIRHQGSFVRDNAPRKLWLLEKGVSFTYDSEKCSSEEKWQRYKEIFSLYYAENGDLN

SEQ ID NO: 1189 - protein, 74 aa, unidentified
  source 1..74: note = MG161-97 functional domain
MPQRYEVQGIKIGMILTQIRCKGNFVRDNAPRKLWLLEKGVSFTYDSLNSVSEEKWQRYKEIFSLYFAENGDLN

SEQ ID NO: 1190 - protein, 47 aa, unidentified
  source 1..47: note = MG161-98 functional domain
MPRSYQHQGVKIGIVLKDIRLKGTFVRDNLQRKQWLLEKGVSFTYDS

SEQ ID NO: 1191 - protein, 93 aa, unidentified
  source 1..93: note = MG161-99 functional domain
ATPVVTAVGGAFTYNGTAKAGSGSVVGVQTPAETLTPAVTLNYSGTPNGTAANSYNSANAPSLAGAYTVTANFAGNDNYNSGSSSAVALTIGK

SEQ ID NO: 1192 - protein, 93 aa, unidentified
  source 1..93: note = MG161-100 functional domain
ATPIVTAVGGAFTYDGTAKAGSGSVVGVQTPAETLTPAVTFNYSGTPNGTAANSYNSGNAPTLAGTYTVTANFAGNNNYSSGSSSAVVLTIGK

SEQ ID NO: 1193 - protein, 93 aa, unidentified
  source 1..93: note = MG161-101 functional domain
ATPVVTAVGGSFTYDGTAKTGSGSVVGVQTPAEILTPAVTFSYSGTPNGAVANSYNSANAPTLAGTYTVTANFAGNNNYNSGSSSAVALTIGK

SEQ ID NO: 1194 - protein, 92 aa, unidentified
  source 1..92: note = MG161-102 functional domain
ATPVVTAVGGAFTYNGTAKAGSGSVVGVQTPAETLTPAATLSYSGTTNGNVAYGPVAQAPTLAGTYTVTASFAGNNNYNSGSSSAVALTIGK

SEQ ID NO: 1195 - protein, 45 aa, unidentified
  source 1..45: note = MG161-103 functional domain
AGSEVDVYVAGNEYNGSNIIVAKYWKNGKAVSLTDGTKDASAGSD

SEQ ID NO: 1196 - protein, 41 aa, unidentified
  source 1..41: note = MG161-104 functional domain
AGGGPITVVGSDVYVAGSEKNGSNISVAKYWKNGKAVSLTD

SEQ ID NO: 1197 - protein, 44 aa, unidentified
  source 1..44: note = MG161-105 functional domain
GTKSAYANSITVAGTDVYVAGWESNGSFAVGKYWKNGQAISLTD

SEQ ID NO: 1198 - protein, 41 aa, unidentified
  source 1..41: note = MG161-106 functional domain
GTNDAIAISIAVVGNDVYVAGDEGYVAKYWKNGQAIALEIF

SEQ ID NO: 1199 - protein, 42 aa, unidentified
  source 1..42: note = MG161-107 functional domain
ASAKSIAVVGSDVYVAGYGQNFGFLIPVAKYWKNGKAVSLTD

SEQ ID NO: 1200 - protein, 47 aa, unidentified
  source 1..47: note = MG161-108 functional domain
GTSSAGAKSIAVVGSDVYVAGYEQDKDRNFDPVVKYWKNGKAIALAD

SEQ ID NO: 1201 - protein, 40 aa, unidentified
  source 1..40: note = MG161-109 functional domain
YGVAYSIAVLGSDVFVAGVDYNESNVAKYWKNGQAISLTN

SEQ ID NO: 1202 - protein, 41 aa, unidentified
  source 1..41: note = MG161-111 functional domain
MKKVWKVGKMISFTYDDNGKTGRGAVSEKDAPAELKNKVGK

SEQ ID NO: 1203 - protein, 64 aa, unidentified
  source 1..64: note = MG161-113 functional domain
MAAKVKFKYKGQEKEVDISKIKKVWRVGKMVSFTYDDNGKTGRGAVSEKEPPKELLDMLAKQKK

SEQ ID NO: 1204 - protein, 60 aa, unidentified
  source 1..60: note = MG161-114 functional domain
MKFKYKGQEKEVDISKIKKVWRVGKMVSFTYDDNGKTGRGAVSEKDAPKELLDMLAKQKK

SEQ ID NO: 1205 - protein, 80 aa, unidentified
  source 1..80: note = MG161-115 functional domain
MRPSAASLEAARGVELLIGGLWRKGEEKEVDISKIKKVWRVGKMISFTYDDNGKTGRGAVSEKDAPKELLDMLEKQSKSK

SEQ ID NO: 1206 - protein, 89 aa, unidentified
  source 1..89: note = MG161-116 functional domain
EKQVDISKIKKVWRVGKMISFTYDEGGGKTGRGGVSEKDAPKELEEKIESTDDIQTLDEMFKKAILASKIEEILKPSLVQHLLKEDLPI

SEQ ID NO: 1207 - protein, 64 aa, unidentified
  source 1..64: note = MG161-118 functional domain
MAKIRFKYKGEEHEIETSKVKKVWRVGKMISFTYDAGGGKTGRGAVSEKEAPKELLDMLEKSKK

SEQ ID NO: 1208 - protein, 64 aa, unidentified
  source 1..64: note = MG161-119 functional domain
MVTVKFKYKGEEKSVDVSKIKKVWKVGKMISFTYDDNGKTGRGAVSEKDAPKELIEMLEKSGKK

SEQ ID NO: 1209 - protein, 63 aa, unidentified
  source 1..63: note = MG161-120 functional domain
MAKIKFKYKGEEHEIDTKQIKKAWKVGKMISFTYDAGGGKTGRGAISEKDAPKELLEMVGKGK

SEQ ID NO: 1210 - protein, 64 aa, unidentified
  source 1..64: note = MG161-125 functional domain
MAAKVKFKYKGQEKEVDISKIKKVWRVGKMVSFTYDDNGKTGRGAVSEKDAPKELLDMLAKQKK

SEQ ID NO: 1211 - protein, 42 aa, unidentified
  source 1..42: note = MG161-126 functional domain
MAKVKFKYKGEEKEVDTSQIKKAWRVGKMISFTYDEGGGKTG

SEQ ID NO: 1212 - protein, 60 aa, unidentified
  source 1..60: note = MG161-130 functional domain
MVKFKYKGEEKEVDTSKIKKVWKVGKMISFTYDEGGGKTGRGAVSEKDAPKELQNMLDKK

SEQ ID NO: 1213 - protein, 63 aa, unidentified
  source 1..63: note = MG161-132 functional domain
MAKVKFVYKGEEKEVDISKIKKVWRVGKMISFTYEDNGKLGRGAVSEKNAPKELLALLSQQKK

SEQ ID NO: 1214 - protein, 60 aa, unidentified
  source 1..60: note = MG161-133 functional domain
MPTIKFKYKGEEKEVELEKIKKAWTVGDKMVSFLYEEGGKVKRGGLSLREAPKELLALLE

SEQ ID NO: 1215 - protein, 106 aa, unidentified
  source 1..106: note = MG161-135 functional domain
MKLIILSLIIVCTWSQQIKILFCSRLNGFVSITHSLFKAFKCINIIMPTIKFKYKGEEKEVEVEKIKKAWIVGDKMLAFLYEEGGKVKRGGLSLREAPKELLALLE

SEQ ID NO: 1216 - protein, 60 aa, unidentified; identical to SEQ ID NO: 1140
  source 1..60: note = MG161-136 functional domain

SEQ ID NO: 1217 - protein, 64 aa, unidentified; identical to SEQ ID NO: 1148
  source 1..64: note = MG161-137 functional domain

SEQ ID NO: 1218 - protein, 64 aa, unidentified
  source 1..64: note = MG161-138 functional domain
MAKVKFRYKGEEKEVDISKIKKVWRVGKMISFTYDDNGKTGRGAVSEKDAPKELLDMLNKQAKK

SEQ ID NO: 1219 - protein, 64 aa, unidentified; identical to SEQ ID NO: 1149
  source 1..64: note = MG161-139 functional domain

SEQ ID NO: 1220 - protein, 64 aa, unidentified
  source 1..64: note = MG161-140 functional domain
MVTVKFKYKGEQKEVDISKIKKVWRVGKMISFTYDENGKTGRGAVSEKDAPKELLELLEKQQKK

SEQ ID NO: 1221 - protein, 65 aa, unidentified
  source 1..65: note = MG161-143 functional domain
MTKVKFKYKEEEKEGDTSKIKNVWRVGKMISFTYDDNGKTGRGAVSEKDAPKELLDMLAKAEKGK

SEQ ID NO: 1222 - protein, 64 aa, unidentified
  source 1..64: note = MG161-146 functional domain
MVKVKFKYKGEEKEVDISKIKKVWRVGKMISFTYDDNGKTGRGAVSEKDAPKELLDLLNKQSKK

SEQ ID NO: 1223 - protein, 65 aa, unidentified
  source 1..65: note = MG161-148 functional domain
MVTVRFKYKGEEKEVDVSKIKKVWRVGKMISFTYDDNGKTGRGAVSEKDAPKELLAMLEKQSKSK

SEQ ID NO: 1224 - protein, 65 aa, unidentified
  source 1..65: note = MG161-151 functional domain
GFSGEYVAQFSIITGIPQGVYLMFVNGTGFSIFTYDDNGKTGRGAVSEKDAPKELLDLLNKQSKK

SEQ ID NO: 1225 - protein, 67 aa, unidentified
  source 1..67: note = MG161-152 functional domain
MVSVKFKVKGQEKEVDVSKIKKAWIVGKMVSFTYDDNGKTGRGAVSEKDAPKELLDMVQKDKVTTAQ

SEQ ID NO: 1226 - protein, 48 aa, unidentified
  source 1..48: note = MG161-154 functional domain
MDISKIKKAWIVGKMVSFTYDDNGKTGRGAVSEKDAPKELLDKVTTAQ

SEQ ID NO: 1227 - protein, 59 aa, unidentified
  source 1..59: note = MG161-155 functional domain
VKVKFVYKGEEKEVDISKIKKAWRVGRMISFTYDDNGKTSRGAVSEKDAPKELLALVKK

SEQ ID NO: 1228 - protein, 62 aa, unidentified
  source 1..62: note = MG161-157 functional domain
MAKVKFVFKGEEKEVDISKIKKVWRVGKMISFTYEDNGKLGRGAVSEKNAPKELLALLSQKK

SEQ ID NO: 1229 - protein, 60 aa, unidentified
  source 1..60: note = MG161-158 functional domain
MVKVKFVYKGEQKEVDVSKIKKAWRVGRMISFTYDDNGKTGRGAVSEKDAPKELLALVKK

SEQ ID NO: 1230 - protein, 64 aa, unidentified; identical to SEQ ID NO: 1222
  source 1..64: note = MG161-159 functional domain

SEQ ID NO: 1231 - protein, 42 aa, unidentified
  source 1..42: note = MG161-160 functional domain
MFLSNDAKHTHMTTVKFKYKGEEKEVDISKVKKVWKVGKMVS

SEQ ID NO: 1232 - protein, 60 aa, unidentified
  source 1..60: note = MG161-161 functional domain
MATVKFKYKGETKQVDISKVKKVWKVGKMISFTYDDNGKTGRGAVSEKDAPAELKNKVGK

SEQ ID NO: 1233 - protein, 106 aa, unidentified
  source 1..106: note = MG161-162 functional domain
MKLIILSLIIVCTWSQQIKILFCSRLNGFVSITHSLFKAFKCINIIMPTIKFKYKGEEKEVEVEKIKKAWKVGDKMLAFLYEEGGKVKRGGLSLREAPKELLALLE

SEQ ID NO: 1234 - protein, 64 aa, unidentified
  source 1..64: note = MG161-163 functional domain
MAAKVKFKFKGEEKEVEMNKIKKVWRVGKMISFTYDDNGKTGRGAVSEKNAPRELIDMVEKGKK

SEQ ID NO: 1235 - protein, 64 aa, unidentified
  source 1..64: note = MG161-164 functional domain
MAKIKFKYKGEEHEVDTSQIKKAWRVGKMISFTYDAGGGKTGRGAISEKEAPKELLDMVEKGKK

SEQ ID NO: 1236 - protein, 64 aa, unidentified
  source 1..64: note = MG161-165 functional domain
MAKIKFKYKGEEHEIDTSQIKKAWRVGKMISFTYDAGGGKTGRGAISEKEAPKELLNMVEKGKK

SEQ ID NO: 1237 - protein, 65 aa, unidentified
  source 1..65: note = MG161-166 functional domain
MAAKVKFKYKGQEKEVEISKIKKVWRVGKMISFTYDDNGKTGRGAVSDKDAPKELLDLLAKQQKK

SEQ ID NO: 1238 - protein, 69 aa, unidentified
  source 1..69: note = MG161-173 functional domain
MAVNDQQTSDLQEKLVQVNRVAKVVKGGRIFSFTALTVVGDGNGKVGFGRGKAREVPQAIQKAMEQARR

SEQ ID NO: 1239 - protein, 71 aa, unidentified
  source 1..71: note = MG161-174 functional domain
MSIGTNLDRSVNAGGLDLQERVVEINRVAKVVKGGRRFSFTALVVVGDENGIVGAGYGSAKDVPKAIPNGV

SEQ ID NO: 1240 - protein, 90 aa, unidentified
  source 1..90: note = MG161-175 functional domain
MNAKVETQQQGDLQEKLVQVNRVAKVVKGGRIFSFTALTVVGDGNGKVGYGRGKAREVPAAIQKAMEAARRNMVSVKLDGDTIQYPTKAA

SEQ ID NO: 1241 - protein, 96 aa, unidentified
  source 1..96: note = MG161-176 functional domain
LLLGDMLELGKHSKKLHQTIGKIINNTKIDKVFVKGNKVLFTYNSVSKKKRGSVLNKNSQIIDLIKNDLNNNDYLMVKASNATGFNKIIREVKGYK

SEQ ID NO: 1242 - protein, 95 aa, unidentified
  source 1..95: note = MG162-2 functional domain
MPKRKIDGEKGAKGKEEPTRRSARLSAKPAPPKPEPKAKKAAPKKAAKGKKGSNPAENGDAKADQAQKVDATGDAKWEANECLILLCTWWLYSLK

SEQ ID NO: 1243 - protein, 95 aa, unidentified
  source 1..95: note = MG162-4 functional domain
MPKRKGTDGEVKEEPQRRSARLSAKPTPPKPEPKPKKTPKKDKEVNDKKEDKKAKGKADESKEENQSENGETKTNEVEKTADEAAEGEKDDPKTE

SEQ ID NO: 1244 - protein, 87 aa, unidentified
  source 1..87: note = MG162-5 functional domain
MPKRSKANNDAEVSEPKRRSERLVNKPAPPKAEPKPKKAPAKPKKTKEPKEPKEEEKKEEVPAENGETKADDDASATEDGDKKEDGE

SEQ ID NO: 1245 - protein, 98 aa, unidentified
  source 1..98: note = MG162-6 functional domain
MPKRKSPEGAEAKDATKVTKHEPTRRSERLSSKPAPPKPEPKAKKPAAKKPSNDKAVKEKKGGAKGKKEEKDSVPTANGETKPEEETETPKTEAEGKE

SEQ ID NO: 1246 - protein, 93 aa, unidentified
  source 1..93: note = MG162-7 functional domain
MPKRSKANNDTEAAGPKRRSERLQGKPQTPKSEPKPKKAPARGKKAKDVEKAKPEEKKEDAKPEAEEKTPAENGETKADENNGEAGGDDEKAE

SEQ ID NO: 1247 - protein, 97 aa, unidentified
  source 1..97: note = MG162-8 functional domain
MPKRKTQGAEGEVKEEPQRRSARLSLKPAPPKAEAKPRKAAKKEKAVNDKKEDKKTKGKKKAEEETNEENHSENGEAKNDEVAEAPEEAGKEEAKPE

SEQ ID NO: 1248 - protein, 97 aa, unidentified
  source 1..97: note = MG162-9 functional domain
MPKRKQGAEGDVKEEPQRRSARLSAKPAPPKPEPKPKKPAKKEKAVNDKKEEKKPKVKKGKEEAEANEENHSENGEAKTNEVEEAPEEPEKEEPKSE

SEQ ID NO: 1249 - protein, 106 aa, unidentified
  source 1..106: note = MG162-13 functional domain
MLFHVLTCDICFADLQGTDGEVKEEPQRRSARLSAKPTPPKPEPKPKKTPKKEKEVNDKKEDKKAKAKAEESKEENQSENGETKTNEVEKTPDEAAEAEKEDPKTE

SEQ ID NO: 1250 - protein, 95 aa, unidentified
  source 1..95: note = MG162-14 functional domain
MPKRKSPEGAEAKDATKVTKKEPTRRSERLSSKPAPPKPEPKAKKPAAKKPSNDKVVKEKKGGAKGKKEEKESAPTANGETKPEEGTEAKTEAKE

SEQ ID NO: 1251 - protein, 96 aa, unidentified
  source 1..96: note = MG162-15 functional domain
MPKRKSPEGAEAKDATKVTKKEPTRRSERLSSKPAPPKPEPKAKKPAAKKPSNDKAIKEKKGGAKGKKEEKESAPTANGETKPEEETETPKTEAKE

SEQ ID NO: 1252 - protein, 95 aa, unidentified
  source 1..95: note = MG162-16 functional domain
MPKRKIDGEKAAKGKEEPTRRSARLSAKPAPPKPEPKPKKAAPKKPAKGKKGSNPAENGDAKADQAQKVDAAGDAKWEANECLILLCTWWLYSLK

SEQ ID NO: 1253 - protein, 94 aa, unidentified
  source 1..94: note = MG162-17 functional domain
MFFHSQRADGEAKDEPQRRSARLSARPAPAKAEPKSKKTAKKDKAVKKEDKKTKVKAKETSESAANEENHSENGDAKTNAVAKTNKEAKEAKSE

SEQ ID NO: 1254 - protein, 94 aa, unidentified
  source 1..94: note = MG162-19 functional domain
MPKRKGASGDAAEEPKRRSLRLSAKPAPSKPEPKVKKAAKKDKAVNDKKEAKKAKAKEVTEEEAAEENHSENGEAKAEEEEAAPEAEAEEAKAE

SEQ ID NO: 1255 - protein, 7 aa, synthetic construct
RXSXRLS

SEQ ID NO: 1256 - DNA, 42 bp, synthetic construct
  source 1..42: mol_type = other DNA
gctcttccgatctnnnnngatgagcgcattgttagatttcat

SEQ ID NO: 1257 - DNA, 20 bp, synthetic construct
  source 1..20: mol_type = other DNA
aaaccgacatcgcaggcttc

SEQ ID NO: 1258 - DNA, 16 bp, synthetic construct
  source 1..16: mol_type = other DNA
ccyccnnnnnnggrgg

SEQ ID NO: 1259 - protein, 33 aa, synthetic construct
KATEILQSYEGTEQLFNTLFQAYNSEEDILTRT

SEQ ID NO: 1260 - protein, 22 aa, synthetic construct
RAGQDLSVEYSNHVWQCDHTRA

SEQ ID NO: 1261 - protein, 20 aa, synthetic construct
KTVVTLSHVEALHNWLEGKR

SEQ ID NO: 1262 - protein, 25 aa, synthetic construct
RFIPIPTEEELTALSEVVQVEVERL

SEQ ID NO: 1263 - protein, 6 aa, synthetic construct
RXSXRL

SEQ ID NO: 1264 - DNA, 89 bp, synthetic construct
  source 1..89: mol_type = other DNA
ttcacagaatagggttgaagattgaattcatagctatcccaaatgtacattaacagattatttgtcatcggtaacaaattgttgtcatc

SEQ ID NO: 1265 - DNA, 91 bp, synthetic construct
  source 1..91: mol_type = other DNA
ttcacagaatagggttgaagattgaattcatagctatcccaaagatgtacattaacagattatttgtcatcggtaacaaattgttgtcatc

SEQ ID NO: 1266 - DNA, 91 bp, synthetic construct; identical to SEQ ID NO: 1265
  source 1..91: mol_type = other DNA

SEQ ID NO: 1267 - DNA, 91 bp, synthetic construct; identical to SEQ ID NO: 1265
  source 1..91: mol_type = other DNA

SEQ ID NO: 1268 - DNA, 91 bp, synthetic construct
  source 1..91: mol_type = other DNA
ttcacagaatagggttgaagattgaattcatagctatcccaaagatgtacattaacagattatttgtcatcggtaacaaattgttgtcttc

SEQ ID NO: 1269 - DNA, 91 bp, synthetic construct; identical to SEQ ID NO: 1265
  source 1..91: mol_type = other DNA

SEQ ID NO: 1270 - DNA, 89 bp, synthetic construct; identical to SEQ ID NO: 1264
  source 1..89: mol_type = other DNA

SEQ ID NO: 1271 - DNA, 89 bp, synthetic construct; identical to SEQ ID NO: 1264
  source 1..89: mol_type = other DNA

SEQ ID NO: 1272 - DNA, 89 bp, synthetic construct; identical to SEQ ID NO: 1264
  source 1..89: mol_type = other DNA

SEQ ID NO: 1273 - DNA, 89 bp, synthetic construct; identical to SEQ ID NO: 1264
  source 1..89: mol_type = other DNA

SEQ ID NO: 1274 - DNA, 89 bp, synthetic construct; identical to SEQ ID NO: 1264
  source 1..89: mol_type = other DNA

SEQ ID NO: 1275 - DNA, 108 bp, synthetic construct
  source 1..108: mol_type = other DNA
agacactaaaagagtattagatattatctaagtttgaatataaggctataaatgtacattaacagattatttgtcatcggtaacaaattgttgtcatcttaacaaaat

SEQ ID NO: 1276 - DNA, 111 bp, synthetic construct
  source 1..111: mol_type = other DNA
agacactaaaagagtattagatattatctaagtttgaatataaggctataaatattgtacattaacagattatttgtcatcggtaacaaattgttgtcatcttaacaaaat

SEQ ID NO: 1277 - DNA, 111 bp, synthetic construct; identical to SEQ ID NO: 1276
  source 1..111: mol_type = other DNA

SEQ ID NO: 1278 - DNA, 111 bp, synthetic construct; identical to SEQ ID NO: 1276
  source 1..111: mol_type = other DNA

SEQ ID NO: 1279 - DNA, 110 bp, synthetic construct
  source 1..110: mol_type = other DNA
agacactaaaagagtattagatattatctaagtttgaatataaggctataaatatgtacattaacagattatttgtcatcggtaacaaattgttgtcatcttaacaaaat

SEQ ID NO: 1280 - DNA, 114 bp, synthetic construct
  source 1..114: mol_type = other DNA
ctgaagaaaacaagaagtaataatgttactttttatatttctttccatttgacttatgtacattaacagattatttgtcatcggtaacaaattgttgtcatcttaacaaaatat

SEQ ID NO: 1281 - DNA, 115 bp, synthetic construct
  source 1..115: mol_type = other DNA
ctgaagaaaacaagaagtaataatgttactttttatatttctttccatttgactttatgtacattaacagattatttgtcatcggtaacaaattgttgtcatcttaacaaaatat

SEQ ID NO: 1282 - DNA, 55 bp, synthetic construct
  source 1..55: mol_type = other DNA
aaattaaaagtgtgtgttactaattttgtacattaacagattatttgtcatcggt

SEQ ID NO: 1283 - DNA, 57 bp, synthetic construct
  source 1..57: mol_type = other DNA
aaattaaaagtgtgtgttactaattttatgtacattaacagattatttgtcatcggt

SEQ ID NO: 1284 - DNA, 55 bp, synthetic construct; identical to SEQ ID NO: 1282
  source 1..55: mol_type = other DNA

SEQ ID NO: 1285 - DNA, 55 bp, synthetic construct; identical to SEQ ID NO: 1282
  source 1..55: mol_type = other DNA

SEQ ID NO: 1286 - DNA, 72 bp, synthetic construct
  source 1..72: mol_type = other DNA
caaaaagcagcatattacagttagttgtcttcatcaatttgtacattaacagattatttgtcatcggtaaca

SEQ ID NO: 1287 - DNA, 77 bp, synthetic construct
  source 1..77: mol_type = other DNA
caaaaagcagcatattacagttagttgtcttcatcaatctttaatgtacattaacagattatttgtcatcggtaaca

SEQ ID NO: 1288 - DNA, 71 bp, synthetic construct
  source 1..71: mol_type = other DNA
caaaaagcagcatattacagttagttgtcttcatcaattgtacattaacagattatttgtcatcggtaaca

SEQ ID NO: 1289 - DNA, 78 bp, synthetic construct
  source 1..78: mol_type = other DNA
gcatattacagttagttgtcttcatcaatctttaaatatgtacattaacagattatttgtcatcggtaacaaattgtt

SEQ ID NO: 1290 - DNA, 81 bp, synthetic construct
  source 1..81: mol_type = other DNA
gcatattacagttagttgtcttcatcaatctttaaatatgttgtacattaacagattatttgtcatcggtaacaaattgtt

SEQ ID NO: 1291 - DNA, 81 bp, synthetic construct; identical to SEQ ID NO: 1290
  source 1..81: mol_type = other DNA

SEQ ID NO: 1292 - DNA, 81 bp, synthetic construct; identical to SEQ ID NO: 1290
  source 1..81: mol_type = other DNA

SEQ ID NO: 1293 - DNA, 80 bp, synthetic construct
  source 1..80: mol_type = other DNA
gcatattacagttagttgtcttcatcaatctttaaatatgtgtacattaacagattatttgtcatcggtaacaaattgtt

SEQ ID NO: 1294 - DNA, 78 bp, synthetic construct; identical to SEQ ID NO: 1289
  source 1..78: mol_type = other DNA

SEQ ID NO: 1295 - DNA, 78 bp, synthetic construct; identical to SEQ ID NO: 1289
  source 1..78: mol_type = other DNA

SEQ ID NO: 1296 - DNA, 78 bp, synthetic construct; identical to SEQ ID NO: 1289
  source 1..78: mol_type = other DNA

SEQ ID NO: 1297 - DNA, 78 bp, synthetic construct; identical to SEQ ID NO: 1289
  source 1..78: mol_type = other DNA

SEQ ID NO: 1298 - DNA, 65 bp, synthetic construct
  source 1..65: mol_type = other DNA
agacctccatcgcgcactccggggagtggagggaaggtgtacattaacagattatttgtcatcgg

SEQ ID NO: 1299 - DNA, 67 bp, synthetic construct
  source 1..67: mol_type = other DNA
agacctccatcgcgcactccggggagtggagggaaggagtgtacattaacagattatttgtcatcgg

SEQ ID NO: 1300 - DNA, 67 bp, synthetic construct; identical to SEQ ID NO: 1299
  source 1..67: mol_type = other DNA

SEQ ID NO: 1301 - DNA, 67 bp, synthetic construct; identical to SEQ ID NO: 1299
  source 1..67: mol_type = other DNA

SEQ ID NO: 1302 - DNA, 67 bp, synthetic construct; identical to SEQ ID NO: 1299
  source 1..67: mol_type = other DNA

SEQ ID NO: 1303 - DNA, 65 bp, synthetic construct; identical to SEQ ID NO: 1298
  source 1..65: mol_type = other DNA

SEQ ID NO: 1304 - DNA, 65 bp, synthetic construct; identical to SEQ ID NO: 1298
  source 1..65: mol_type = other DNA

SEQ ID NO: 1305 - DNA, 55 bp, synthetic construct
  source 1..55: mol_type = other DNA
gaggggagtgttgcaatacctttctgtgtacattaacagattatttgtcatcggt

SEQ ID NO: 1306 - DNA, 57 bp, synthetic construct
  source 1..57: mol_type = other DNA
gaggggagtgttgcaatacctttctgggtgtacattaacagattatttgtcatcggt

SEQ ID NO: 1307 - DNA, 57 bp, synthetic construct; identical to SEQ ID NO: 1306
  source 1..57: mol_type = other DNA

SEQ ID NO: 1308 - DNA, 57 bp, synthetic construct; identical to SEQ ID NO: 1306
  source 1..57: mol_type = other DNA

SEQ ID NO: 1309 - DNA, 57 bp, synthetic construct
  source 1..57: mol_type = other DNA
gaggggagtgttgcaatacctttctgggtgtacattaacagattatttgtcatctgt

SEQ ID NO: 1310 - DNA, 57 bp, synthetic construct; identical to SEQ ID NO: 1306
  source 1..57: mol_type = other DNA

SEQ ID NO: 1311 - DNA, 57 bp, synthetic construct; identical to SEQ ID NO: 1306
  source 1..57: mol_type = other DNA

SEQ ID NO: 1312 - DNA, 57 bp, synthetic construct; identical to SEQ ID NO: 1306
  source 1..57: mol_type = other DNA

SEQ ID NO: 1313 - DNA, 57 bp, synthetic construct; identical to SEQ ID NO: 1306
  source 1..57: mol_type = other DNA

SEQ ID NO: 1314 - DNA, 56 bp, synthetic construct
  source 1..56: mol_type = other DNA
ggagtcttctgggcaggcttaaaggctatgtacattaacagattatttgtcatcgg

SEQ ID NO: 1315 - DNA, 57 bp, synthetic construct
  source 1..57: mol_type = other DNA
ggagtcttctgggcaggcttaaaggctaatgtacattaacagattatttgtcatcgg

SEQ ID NO: 1316 - DNA, 57 bp, synthetic construct; identical to SEQ ID NO: 1315
  source 1..57: mol_type = other DNA

SEQ ID NO: 1317 - DNA, 57 bp, synthetic construct; identical to SEQ ID NO: 1315
  source 1..57: mol_type = other DNA

SEQ ID NO: 1318 - DNA, 57 bp, synthetic construct; identical to SEQ ID NO: 1315
  source 1..57: mol_type = other DNA

SEQ ID NO: 1319 - DNA, 57 bp, synthetic construct; identical to SEQ ID NO: 1315
  source 1..57: mol_type = other DNA

SEQ ID NO: 1320 - DNA, 57 bp, synthetic construct; identical to SEQ ID NO: 1315
  source 1..57: mol_type = other DNA

SEQ ID NO: 1321 - DNA, 57 bp, synthetic construct; identical to SEQ ID NO: 1315
  source 1..57: mol_type = other DNA

SEQ ID NO: 1322 - DNA, 57 bp, synthetic construct; identical to SEQ ID NO: 1315
  source 1..57: mol_type = other DNA

SEQ ID NO: 1323 - DNA, 57 bp, synthetic construct; identical to SEQ ID NO: 1315
  source 1..57: mol_type = other DNA

SEQ ID NO: 1324 - DNA, 37 bp, synthetic construct
  source 1..37: mol_type = other DNA
tgatccgcctcggagtattgtacattaacagattatt

SEQ ID NO: 1325 - DNA, 40 bp, synthetic construct
  source 1..40: mol_type = other DNA
tgatccgcctcggagtattaatgtacattaacagattatt

SEQ ID NO: 1326 - DNA, 37 bp, synthetic construct; identical to SEQ ID NO: 1324
  source 1..37: mol_type = other DNA

SEQ ID NO: 1327 - DNA, 37 bp, synthetic construct; identical to SEQ ID NO: 1324
  source 1..37: mol_type = other DNA

SEQ ID NO: 1328 - DNA, 56 bp, synthetic construct
  source 1..56: mol_type = other DNA
gatctcaagcaggagagtataaaacttgtacattaacagattatttgtcatcggta

SEQ ID NO: 1329 - DNA, 58 bp, synthetic construct
  source 1..58: mol_type = other DNA
gatctcaagcaggagagtataaaactcgtgtacattaacagattatttgtcatcggta

SEQ ID NO: 1330 - DNA, 56 bp, synthetic construct; identical to SEQ ID NO: 1328
  source 1..56: mol_type = other DNA

SEQ ID NO: 1331 - protein, 44 aa, synthetic construct
  VARIANT 8: note = K, Y, S, G or Q
  VARIANT 31: note = T, K, N or S or absent
  VARIANT 32: note = G, D, S, F, Y or R
VYVAGYEXNGSIPVAKYWKNGKAISLTDGTXXASAKSIAVVGSD

SEQ ID NO: 1332 - protein, 63 aa, Saccharolobus solfataricus
ATVKFKYKGEEKEVDISKIKKVWRVGKMISFTYDEGGGKTGRGAVSEKDAPKELLQMLEKQKK

SEQ ID NO: 1333 - protein, 51 aa, synthetic construct; identical to SEQ ID NO: 1141

SEQ ID NO: 1334 - protein, 45 aa, synthetic construct; identical to SEQ ID NO: 1142

SEQ ID NO: 1335 - protein, 44 aa, synthetic construct
VYVAGWFSNGSFAVGKYWKNGQAISLTDGTNDAIAISIAVVGND

SEQ ID NO: 1336 - protein, 37 aa, synthetic construct; identical to SEQ ID NO: 1145

SEQ ID NO: 1337 - protein, 46 aa, synthetic construct; identical to SEQ ID NO: 1146

SEQ ID NO: 1338 - protein, 44 aa, synthetic construct; identical to SEQ ID NO: 1144

SEQ ID NO: 1339 - protein, 42 aa, synthetic construct; identical to SEQ ID NO: 1147

SEQ ID NO: 1340 - protein, 91 aa, synthetic construct
  VARIANT 8: note = E, D, K, N or absent
  VARIANT 10: note = A, D, E or absent
  VARIANT 16: note = K, Q or T
  VARIANT 40: note = A, G, P, K or absent
  VARIANT 45: note = S, K, V, T or A
  VARIANT 47: note = K, D, E or absent
  VARIANT 51: note = T, I, A, K, D, P, E, M or absent
  VARIANT 59: note = G, T, D, K, V or absent
  VARIANT 76: note = T, N, L, A, P or absent
  VARIANT 80: note = P, E, Q, A, T or N
  VARIANT 81: note = A, K, S, E, G or absent
  VARIANT 82: note = S, V, T, A, E or absent
  VARIANT 83: note = D, E, N, A, T, P or absent
  VARIANT 88: note = A, V, E, P or S
MPKRKGAXGXVKEEPXRRSARLSAKPAPPKPEPKPKKAAXKDKAXNXKKEXKKKKGKKXADEQKEENPAENGETKXDEVXXXXEEKEXKSE

SEQ ID NO: 1341 - protein, 100 aa, Homo sapiens
MPKRKVSSAEGAAKEEPKRRSARLSAKPPAKVEAKPKKAAAKDKSSDKKVQTKGKRGAKGKQAEVANQETKEDLPAENGETKTEESPASDEAGEKEAKSD

SEQ ID NO: 1342 - protein, 96 aa, Mus musculus
MPKRKVSADGAAKAEPKRRSARLSAKPAPAKVDAKPKKAAGKDKASDKKVQIKGKRGAKGKQADVADQQTTELPAENGETENQSPASEEEKEAKSD

SEQ ID NO: 1343 - protein, 92 aa, synthetic construct
MPKRKAEGDAKGDKTKVKDEPQRRSARLSAKPAPPKPESKTKKAPAKKGEKGKKGEADAGKMRIILQKMEMPRQTRHRKLKVLEMPSDVCAF

SEQ ID NO: 1344 - protein, 84 aa, synthetic construct
MPKRKIDGEKGAKGKEEPTRRSARLSAKPAPPKPEPKAKKAAPKKAAKGKKGSNPAENGDAKADQAQKVDATGDAKWEANECLI

SEQ ID NO: 1345 - protein, 93 aa, synthetic construct
MPKRKRADGEAKDEPQRRSARLSARPAPAKAEPKSKKTAKKDKAVKKEDKKTKVKAKETSESAANEENHSENGDAKTNAVAKTNKEAKEAKSE

SEQ ID NO: 1346 - protein, 95 aa, synthetic construct; identical to SEQ ID NO: 1243

SEQ ID NO: 1347 - protein, 87 aa, synthetic construct; identical to SEQ ID NO: 1244

SEQ ID NO: 1348 - protein, 98 aa, synthetic construct; identical to SEQ ID NO: 1245

SEQ ID NO: 1349 - protein, 93 aa, synthetic construct; identical to SEQ ID NO: 1246

SEQ ID NO: 1350 - protein, 97 aa, synthetic construct; identical to SEQ ID NO: 1247

SEQ ID NO: 1351 - protein, 97 aa, synthetic construct; identical to SEQ ID NO: 1248

SEQ ID NO: 1352 - protein, 96 aa, synthetic construct
MPKRKVSADGAAKAEPKRRSARLSAKPAPAKVDAKPKKATGKDKASDKKVQIKGKRGAKGKQADVADQQTTELPAENGETENQSPASEEEKEAKSD

SEQ ID NO: 1353 - protein, 80 aa, synthetic construct
MPQRKASAMEPKRHSPRMSAKPAPAKVDARQKGQSDKRVQMKGKKGVKVRQAEVADQQTTDLPTEDWSPASEEEKDSRSD

SEQ ID NO: 1354 - protein, 14 aa, synthetic construct
MAPKKKRKVGGGGS

SEQ ID NO: 1355 - protein, 11 aa, synthetic construct
SGGAPKKKRKV

SEQ ID NO: 1356 - protein, 11 aa, synthetic construct
SGGAPKKKRKV

SEQ ID NO: 1357 - protein, 33 aa, synthetic construct
SGGAPKKKRKVSGGAPKKKRKVSGGAPKKKRKV

SEQ ID NO: 1358 - protein, 22 aa, synthetic construct
MKRPAATKKAGQAKKKKGGGGS

SEQ ID NO: 1359 - protein, 19 aa, synthetic construct
SGGKRPAATKKAGQAKKKK

SEQ ID NO: 1360 - protein, 38 aa, synthetic construct
SGGKRPAATKKAGQAKKKKSGGKRPAATKKAGQAKKKK

SEQ ID NO: 1361 - protein, 57 aa, synthetic construct
SGGKRPAATKKAGQAKKKKSGGKRPAATKKAGQAKKKKSGGKRPAATKKAGQAKKKK

SEQ ID NO: 1362 - protein, 15 aa, synthetic construct
MPAAKRVKLDGGGGS

SEQ ID NO: 1363 - protein, 12 aa, synthetic construct
SGGPAAKRVKLD

SEQ ID NO: 1364 - protein, 24 aa, synthetic construct
SGGPAAKRVKLDSGGPAAKRVKLD

SEQ ID NO: 1365 - protein, 36 aa, synthetic construct
SGGPAAKRVKLDSGGPAAKRVKLDSGGPAAKRVKLD

SEQ ID NO: 1366 - protein, 36 aa, synthetic construct; identical to SEQ ID NO: 1365

SEQ ID NO: 1367 - protein, 15 aa, synthetic construct
MQAAKRPRTTGGGGS

SEQ ID NO: 1368 - protein, 12 aa, synthetic construct
SGGQAAKRPRTT

SEQ ID NO: 1369 - protein, 24 aa, synthetic construct
SGGQAAKRPRTTSGGQAAKRPRTT

SEQ ID NO: 1370 - protein, 15 aa, synthetic construct
MRAAKRPRTTGGGGS

SEQ ID NO: 1371 - protein, 12 aa, synthetic construct
SGGRAAKRPRTT

SEQ ID NO: 1372 - protein, 24 aa, synthetic construct
SGGRAAKRPRTTSGGRAAKRPRTT

SEQ ID NO: 1373 - protein, 15 aa, synthetic construct
MRAAKRPRTTGGGGS

SEQ ID NO: 1374 - protein, 12 aa, synthetic construct
SGGRAAKRPRTT

SEQ ID NO: 1375 - protein, 24 aa, synthetic construct
SGGRAAKRPRTTSGGRAAKRPRTT

SEQ ID NO: 1376 - protein, 17 aa, synthetic construct
MAAAKRSWSMAFGGGGS

SEQ ID NO: 1377 - protein, 15 aa, synthetic construct
MSGGAAAKRSWSMAF

SEQ ID NO: 1378 - protein, 30 aa, synthetic construct
MSGGAAAKRSWSMAFMSGGAAAKRSWSMAF

SEQ ID NO: 1379 - protein, 16 aa, synthetic construct
MRAAKRKYFAVGGGGS

SEQ ID NO: 1380 - protein, 14 aa, synthetic construct
MSGGRAAKRKYFAV

SEQ ID NO: 1381 - protein, 28 aa, synthetic construct
MSGGRAAKRKYFAVMSGGRAAKRKYFAV

SEQ ID NO: 1382 - protein, 15 aa, synthetic construct
MPKPQRKTKRGGGGS

SEQ ID NO: 1383 - protein, 12 aa, synthetic construct
SGGPPRKKRTVV

SEQ ID NO: 1384 - protein, 30 aa, synthetic construct
SGGFGNYNNQSSNFGPMKGGNFGGRSSGPY